(19) United States
(12) Patent Application Publication
(10) Pub. No.: US 2022/0119533 A1
(43) Pub. Date: Apr. 21, 2022

(54) HETERODIMERIC FC-FUSED PROTEINS

(71) Applicant: Dragonfly Therapeutics, Inc., Waltham, MA (US)

(72) Inventors: Ann F. CHEUNG, Lincoln, MA (US); Jean-Marie CULLEROT, Somerville, MA (US); Asya GRINBERG, Lexington, MA (US); Eva GUTIERREZ, Waltham, MA (US); William HANEY, Wayland, MA (US); Nicolai WAGTMANN, Concord, MA (US)

(73) Assignee: Dragonfly Therapeutics, Inc., Waltham, MA (US)

(21) Appl. No.: 17/287,849

(22) PCT Filed: Oct. 23, 2019
(86) PCT No.: PCT/US2019/057721

§ 371 Date: Apr. 22, 2021

Related U.S. Application Data
(60) Provisional application No. 62/749,489, filed on Oct. 23, 2018.
(60) Provisional application No. 62/781,898, filed on Dec. 19, 2018.
(60) Provisional application No. 62/788,499, filed on Jan. 4, 2019.
(60) Provisional application No. 62/827,347, filed on Apr. 1, 2019.
(60) Provisional application No. 62/895,889, filed on Sep. 4, 2019.

(51) Int. Cl. C07K 16/28; A61K 45/06; A61P 35/00

(52) U.S. Cl. CPC C07K 16/2851; C07K 16/283; A61K 2039/505; A61P 35/00; A61K 45/06

(57) ABSTRACT

The present invention provides Fc-fused protein constructs, which as monovalent dimers have a higher serum half-life compared to a native/natural molecule, and are, therefore, advantageous for achieving higher titers of the proteins during production, higher stability during storage, and improved efficacy when used as a therapeutic. Also provided are Fc-fused protein constructs having mutations in the Fc region that reduce effector functions, which have increased activity to inhibit tumor growth and are, therefore, advantageous when used as a cancer therapy.

### CROSS-REFERENCE TO RELATED APPLICATIONS

[0001] This application claims the benefit of and priority to U.S. Provisional Patent Application No. 62/749,489, filed Oct. 23, 2018; to U.S. Provisional Patent Application No. 62/781,898, filed Dec. 19, 2018; to U.S. Provisional Patent Application No. 62/788,499, filed Jan. 4, 2019; to U.S. Provisional Patent Application No. 62/827,347, filed Apr. 1, 2019; and to U.S. Provisional Patent Application No. 62/895,889, filed Sep. 4, 2019, the disclosures of which are hereby incorporated by reference in their entireties for all purposes.

### SEQUENCE LISTING

[0002] The instant application contains a Sequence Listing which has been submitted electronically in ASCII format and is hereby incorporated by reference in its entirety. Said ASCII copy, created on Oct. 22, 2019, is named DFY-063WO_SL.txt and is 946,355 bytes in size.

### FIELD OF THE INVENTION

[0003] The invention generally relates to heterodimeric Fc-fused proteins and pharmaceutical compositions comprising such proteins, and methods of use in treating a disease or disorder in a human patient.

### BACKGROUND

[0004] Physiologically active proteins mostly have the disadvantage of having a short in vivo half-life. In order to solve this disadvantage, there has been an attempt to conjugate them to PEG (polyethylene glycol) or the like, or to fuse them to an antibody Fc (crystallizable fragment) region. Proteins composed of two or more different subunits, in which the two or more different subunits form a protein complex to exhibit physiological activity, can be fused to wild-type Fc domains to prepare Fc-fused protein forms, forming a homodimer due to the homodimeric nature of Fc. Proteins composed of two or more different subunits, in which the two or more different subunits form a protein complex to exhibit physiological activity, can also be fused to heterodimeric Fc regions derived not only from IgG1, but also from other isotype antibodies such as IgG2, IgG3 and IgG4, to form a heterodimeric Fc-fused protein. Thus, one or more subunit(s) of the protein, which is composed of two or more different subunits and in which two or more subunits exhibit physiological activity by forming a protein complex, can be fused to the terminus of heterodimeric Fc variant regions to form improved Fc-fused protein forms.

[0005] Fc heterodimerization is a technology that induces mutations in two different CH3 domains of Fc by genetic engineering, such that the two Fc fragments form a heterodimer with minimal sequence variations while they have tertiary structures very similar to those of naturally occurring antibodies (see, e.g., U.S. Pat. No. 7,695,936).

[0006] The inventions described in the present disclosure provide designs for improving the Fc-fused protein forms, in which the two subunits of a heterodimeric protein are connected to two Fc domains having different heterodimerization domains, by introducing linkers of varying lengths, or mutations in the CH2 and the CH3 domains of the Fc.

### SUMMARY

[0007] The invention generally relates to heterodimeric Fc-fused proteins and pharmaceutical compositions comprising such proteins.

[0008] In one aspect the present invention provides a heterodimeric Fc-fused protein comprising a first polypeptide comprising a first antibody Fc domain polypeptide and a first subunit of a multisubunit protein; and a second polypeptide comprising a second antibody Fc domain polypeptide and a second, different subunit of the multisubunit protein, wherein the first and second antibody Fc domain polypeptides each comprise different mutations promoting heterodimerization, wherein the first and/or second antibody Fc domain polypeptides comprise one or more mutation(s) that reduce(s) an effector function of an Fc, and wherein the first subunit and second, different subunit of the multisubunit protein are bound to each other.

[0009] In some embodiments, the effector function comprises the ability of an Fc domain polypeptide to induce antibody-dependent cellular cytotoxicity (ADCC), antibody-dependent cellular phagocytosis (ADCP), and/or complement dependent cytotoxicity (CDC). In some embodiments, the first and second antibody Fc domain polypeptides are human antibody Fc domain polypeptides. In some embodiments, the first and second antibody Fc domain polypeptides are IgG1, IgG2, IgG3, IgG4, IgM, IgA, IgD, or IgE Fc domain polypeptides (e.g., human IgG1, IgG2, IgG3, IgG4, IgM, IgA, IgD, or IgE Fc domain polypeptides). In some embodiments, the first and/or second antibody Fc domain polypeptides comprise one or more mutation(s) at position(s) 233, 234, 235, 236, 237, 297, 318, 320, 322, 329, 330, and/or 331 under EU numbering. In some embodiments, the heterodimeric Fc-fused protein is fucosylated.

[0010] In some embodiments, the first and second antibody Fc domain polypeptides are human IgG1 Fc domain polypeptides. In some embodiments, the first and/or second antibody Fc domain polypeptides comprise one or more mutation(s) at position(s) 234, 235, 237, 329, 330, and/or 331 under EU numbering. In some embodiments, the first and/or second antibody Fc domain polypeptides comprise one or more mutation(s) selected from L234A, L235A, L235E, G237A, P329A, A330S, and P331S. In some embodiments, the first and second antibody Fc domain polypeptides each comprise mutations L234A and L235A. In some embodiments, the first and second antibody Fc domain polypeptides each comprise mutations L234A, L235A, and P329A. In some embodiments, the first and second antibody Fc domain polypeptides each comprise mutations L234A, L235E, G237A, A330S, and P331S. In some embodiments, the first and second antibody Fc domain polypeptides each comprise mutation C220S.

[0011] In some embodiments, the first and second antibody Fc domain polypeptides are human IgG4 Fc domain polypeptides. In some embodiments, the first and/or second antibody Fc domain polypeptides comprise one or more mutation(s) at position(s) 235 and/or 329 under EU numbering. In some embodiments, the first and/or second antibody Fc domain polypeptides comprise one or more mutation(s) selected from L235E and P329A. In some embodiments, the first and second antibody Fc domain polypeptides each comprise mutation L235E. In some embodiments, the first and second antibody Fc domain polypeptides each comprise mutations L235E and P329A. In some embodiments, the first and second antibody Fc domain polypeptides each comprise mutation S228P.

[0012] In another aspect, the present invention provides a heterodimeric Fc-fused protein comprising a first polypeptide comprising the amino acid sequence of SEQ ID NO:290 and a second polypeptide comprising the amino acid sequence of SEQ ID NO:291.

[0013] In yet another aspect, the present invention provides a polypeptide comprising a subunit of a multisubunit cytokine and an immunoglobulin Fc domain polypeptide; the Fc domain polypeptide comprises mutations for promoting heterodimerization with a different immunoglobulin Fc domain polypeptide, and one or more mutation(s) that reduce(s) an effector function of an Fc. For example, the Fc domain polypeptide comprising the mutations can be a human IgG1 antibody Fc domain polypeptide.

[0014] In some embodiments, the one or more mutation(s) that reduce(s) an effector function of an Fc is selected from L234A, L235A or L235E, G237A, P329A, A330S, and P331S, numbered according to the EU numbering system. For example, in some embodiments the mutations that reduce an effector function of an Fc are L234A, L235A, and P329A, numbered according to the EU numbering system.

[0015] In some embodiments, the mutations for promoting heterodimerization are K360E and K409W, numbered according to the EU numbering system. In some other embodiments, the mutations for promoting heterodimerization are Q347R, D399V, and F405T, numbered according to the EU numbering system.

[0016] In some embodiments, the Fc domain polypeptide further comprises a mutation for promoting disulfide bond formation with a different immunoglobulin Fc domain polypeptide. For example, when the heterodimerization mutations are K360E and K409W, in some embodiments the mutation for promoting disulfide bond formation is Y349C, numbered according to the EU numbering system. When the heterodimerization mutations are Q347R, D399V, and F405T, in some embodiments the mutation for promoting disulfide bond formation is S354C, numbered according to the EU numbering system.

[0017] For example, in some embodiments a polypeptide comprising a subunit of a multisubunit cytokine and an immunoglobulin Fc domain polypeptide comprises an amino acid sequence of SEQ ID NO:290 or an amino acid sequence of SEQ ID NO:291.

[0018] In another aspect, the present invention provides a nucleic acid encoding a polypeptide comprising an amino acid sequence of SEQ ID NO:290 or SEQ ID NO:291. In yet another aspect, the present invention provides an expression vector comprising a nucleic acid comprising a sequence encoding a polypeptide comprising an amino acid sequence of SEQ ID NO:290 or SEQ ID NO:291. In one aspect, the present invention provides a cell comprising a nucleic acid encoding a polypeptide comprising an amino acid sequence of SEQ ID NO:290 or SEQ ID NO:291, or an expression vector comprising a nucleic acid comprising a sequence encoding a polypeptide comprising an amino acid sequence of SEQ ID NO:290 or SEQ ID NO:291.

[0019] In another aspect, the present invention provides a heterodimeric Fc-fused protein comprising a first Fc domain polypeptide and a second, different Fc domain polypeptide of an immunoglobulin Fc and a first subunit and a second, different subunit of a multisubunit protein wherein the first subunit and the second, different subunit are bound to each other and linked to one or more end(s) of the N-terminus or C-terminus of the first Fc domain polypeptide and/or the second, different Fc domain polypeptide; wherein the first Fc domain polypeptide and the second Fc domain polypeptide are mutated so as to promote heterodimeric Fc formation and to reduce an effector function of an Fc. In some embodiments, the multisubunit protein is IL-12 (e.g., human IL-12), such that in a heterodimeric Fc-fused protein the p35 and p40 subunits of IL-12 are bound to each other and linked to one or more end(s) of the N-terminus or C-terminus of the first Fc domain polypeptide and/or the second Fc domain polypeptide; wherein the first Fc domain polypeptide and the second Fc domain polypeptide are mutated so as to promote heterodimeric Fc formation and to reduce an effector function of an Fc.

[0020] In one aspect the present invention provides a heterodimeric Fc-fused protein comprising: a first polypeptide comprising a first antibody Fc domain polypeptide and a second polypeptide comprising a second antibody Fc domain polypeptide bound to the first antibody Fc domain polypeptide, in which the first polypeptide further comprises a first subunit of a multisubunit protein fused by a linker comprising amino acid sequence PKSSDKTHTCPPCPAPEX₁X₂GX₃ (SEQ ID NO:237) or EPKSSDKTHTCPPCPAPEX₁X₂GX₃ (SEQ ID NO:6) to the first antibody Fc domain polypeptide, wherein X₁ represents L or A, X₂ represents L, E, or A, and X₃ represents A or G; a second, different subunit of the multisubunit protein is fused to the second antibody Fc domain polypeptide and the subunits of the multisubunit protein are bound to each other; when X₁ represents L and/or X₂ represents L, at least one of the first antibody Fc domain polypeptide and the second antibody Fc domain polypeptide comprises a Q347R mutation for promoting heterodimerization.

[0021] In some embodiments, within the heterodimeric Fc-fused protein, the linker connecting the first subunit of the multisubunit protein to the first antibody Fc domain polypeptide comprises amino acid sequence PKSSDKTHTCPPCPAPEAAGG (SEQ ID NO:239) or EPKSSDKTHTCPPCPAPEAAGG (SEQ ID NO:9). In some embodiments, within the heterodimeric Fc-fused protein, the linker connecting the first subunit of the multisubunit protein to the first antibody Fc domain polypeptide consists of amino acid sequence PKSSDKTHTCPPCPAPEAAGG (SEQ ID NO:239) or EPKSSDKTHTCPPCPAPEAAGG (SEQ ID NO:9).

[0022] In some embodiments, within the heterodimeric Fc-fused protein, the second, different subunit of the multisubunit protein is fused to the second antibody Fc domain polypeptide by a linker comprising amino acid sequence GGGGSGGGGSGGGGSEPKSSDKTHTCPPCPAPEAAGG (SEQ ID NO:10) or GGGGSGGGGSGGGGSPKSSDKTHTCPPCPAPEAAGG (SEQ ID NO:244). In some embodiments, the second, different subunit of the multisubunit protein is fused to the second antibody Fc domain polypeptide by a linker consisting of amino acid sequence GGGGSGGGGSGGGGSEPKSSDKTHTCPPCPAPEAAGG (SEQ ID NO:10) or GGGGSGGGGSGGGGSPKSSDKTHTCPPCPAPEAAGG (SEQ ID NO:244).

[0023] In some embodiments, within the heterodimeric Fc-fused protein, the linker connecting the first subunit of the multisubunit protein to the first antibody Fc domain polypeptide comprises amino acid sequence PKSSDKTHTCPPCPAPELLGG (SEQ ID NO:238) or EPKSSDKTHTCPPCPAPELLGG (SEQ ID NO:7). In some embodiments, within the heterodimeric Fc-fused protein, the linker fusing the first subunit of the multisubunit protein to the first antibody Fc domain polypeptide consists of amino acid sequence PKSSDKTHTCPPCPAPELLGG (SEQ ID NO:238) or EPKSSDKTHTCPPCPAPELLGG (SEQ ID NO:7).

[0024] In some embodiments, within the heterodimeric Fc-fused protein, the second, different subunit of the multisubunit protein is fused to the second antibody Fc domain polypeptide by a linker comprising amino acid sequence GGGGSGGGGSGGGGSEPKSSDKTHTCPPCPAPELLGG (SEQ ID NO:8) or GGGGSGGGGSGGGGSPKSSDKTHTCPPCPAPELLGG (SEQ ID NO:241). In some embodiments, the second, different subunit of the multisubunit protein is fused to the second antibody Fc domain polypeptide by a linker consisting of amino acid sequence GGGGSGGGGSGGGGSEPKSSDKTHTCPPCPAPELLGG (SEQ ID NO:8) or GGGGSGGGGSGGGGSPKSSDKTHTCPPCPAPELLGG (SEQ ID NO:241).

[0025] In some embodiments, within the heterodimeric Fc-fused protein, the second, different subunit of the multisubunit protein is fused to the second antibody Fc domain polypeptide by a linker comprising amino acid sequence GGGGSEPKSSDKTHTCPPCPAPELLGG (SEQ ID NO:15) or GGGGSPKSSDKTHTCPPCPAPELLGG (SEQ ID NO:242). In some embodiments, the second, different subunit of the multisubunit protein is fused to the second antibody Fc domain polypeptide by a linker consisting of amino acid sequence GGGGSEPKSSDKTHTCPPCPAPELLGG (SEQ ID NO:15) or GGGGSPKSSDKTHTCPPCPAPELLGG (SEQ ID NO:242).

[0026] In some embodiments, within the heterodimeric Fc-fused protein, the second, different subunit of the multisubunit protein is fused to the second antibody Fc domain polypeptide by a linker comprising amino acid sequence GGGGSGGGGSEPKSSDKTHTCPPCPAPELLGG (SEQ ID NO:16) or GGGGSGGGGSPKSSDKTHTCPPCPAPELLGG (SEQ ID NO:243). In some embodiments, the second, different subunit of the multisubunit protein is fused to the second antibody Fc domain polypeptide by a linker consisting of amino acid sequence GGGGSGGGGSEPKSSDKTHTCPPCPAPELLGG (SEQ ID NO:16) or GGGGSGGGGSPKSSDKTHTCPPCPAPELLGG (SEQ ID NO:243).

[0027] In some embodiments, within the heterodimeric Fc-fused protein, the second, different subunit of the multisubunit protein is fused to the second antibody Fc domain polypeptide by a linker comprising amino acid sequence GGGGSEPKSSDKTHTCPPCPAPEAAGG (SEQ ID NO:65) or GGGGSPKSSDKTHTCPPCPAPEAAGG (SEQ ID NO:245). In some embodiments, the second, different subunit of the multisubunit protein is fused to the second antibody Fc domain polypeptide by a linker consisting of amino acid sequence GGGGSEPKSSDKTHTCPPCPAPEAAGG (SEQ ID NO:65) or GGGGSPKSSDKTHTCPPCPAPEAAGG (SEQ ID NO:245).

[0028] In some embodiments, within the heterodimeric Fc-fused protein, the second, different subunit of the multisubunit protein is fused to the second antibody Fc domain polypeptide by a linker comprising amino acid sequence GGGGSGGGGSEPKSSDKTHTCPPCPAPEAAGG (SEQ ID NO:66) or GGGGSGGGGSPKSSDKTHTCPPCPAPEAAGG (SEQ ID NO:246). In some embodiments, the second, different subunit of the multisubunit protein is fused to the second antibody Fc domain polypeptide by a linker consisting of amino acid sequence GGGGSGGGGSEPKSSDKTHTCPPCPAPEAAGG (SEQ ID NO:66) or GGGGSGGGGSPKSSDKTHTCPPCPAPEAAGG (SEQ ID NO:246).

[0029] In some embodiments, within the heterodimeric Fc-fused protein, the linker connecting the first subunit of the multisubunit protein to the first antibody Fc domain polypeptide comprises amino acid sequence EPKSSDKTHTCPPCPAPEAEGA (SEQ ID NO:11) or PKSSDKTHTCPPCPAPEAEGA (SEQ ID NO:240). In some embodiments, within the heterodimeric Fc-fused protein, the linker fusing the first subunit of the multisubunit protein to the first antibody Fc domain polypeptide consists of amino acid sequence EPKSSDKTHTCPPCPAPEAEGA (SEQ ID NO:11) or PKSSDKTHTCPPCPAPEAEGA (SEQ ID NO:240).

[0030] In some embodiments, within the heterodimeric Fc-fused protein, the second, different subunit of the multisubunit protein is fused to the second antibody Fc domain polypeptide by a linker comprising amino acid sequence GGGGSGGGGSGGGGSEPKSSDKTHTCPPCPAPEAEGA (SEQ ID NO:12) or GGGGSGGGGSGGGGSPKSSDKTHTCPPCPAPEAEGA (SEQ ID NO:247). In some embodiments, the second, different subunit of the multisubunit protein is fused to the second antibody Fc domain polypeptide by a linker consisting of amino acid sequence GGGGSGGGGSGGGGSEPKSSDKTHTCPPCPAPEAEGA (SEQ ID NO:12) or GGGGSGGGGSGGGGSPKSSDKTHTCPPCPAPEAEGA (SEQ ID NO:247).

[0031] In some embodiments, within the heterodimeric Fc-fused protein, the second, different subunit of the multisubunit protein is fused to the second antibody Fc domain polypeptide by a linker comprising amino acid sequence GGGGSEPKSSDKTHTCPPCPAPEAEGA (SEQ ID NO:67) or GGGGSPKSSDKTHTCPPCPAPEAEGA (SEQ ID NO:248). In some embodiments, the second, different subunit of the multisubunit protein is fused to the second antibody Fc domain polypeptide by a linker consisting of amino acid sequence GGGGSEPKSSDKTHTCPPCPAPEAEGA (SEQ ID NO:67) or GGGGSPKSSDKTHTCPPCPAPEAEGA (SEQ ID NO:248).

[0032] In some embodiments, within the heterodimeric Fc-fused protein, the second, different subunit of the multisubunit protein is fused to the second antibody Fc domain polypeptide by a linker comprising amino acid sequence GGGGSGGGGSEPKSSDKTHTCPPCPAPEAEGA (SEQ ID NO:68) or GGGGSGGGGSPKSSDKTHTCPPCPAPEAEGA (SEQ ID NO:249). In some embodiments, the second, different subunit of the multisubunit protein is fused to the second antibody Fc domain polypeptide by a linker consisting of amino acid sequence GGGGSGGGGSEPKSSDKTHTCPPCPAPEAEGA (SEQ ID NO:68) or GGGGSGGGGSPKSSDKTHTCPPCPAPEAEGA (SEQ ID NO:249).

[0033] In another aspect, the present invention provides a heterodimeric Fc-fused protein comprising a subunit of a multisubunit cytokine connected to an immunoglobulin Fc domain polypeptide by a linker comprising an amino acid sequence PKSSDKTHTCPPCPAPEAAGG (SEQ ID NO:239); the Fc domain polypeptide comprises mutations for promoting heterodimerization with a different immunoglobulin Fc domain polypeptide, and L234A, L235A, and P329A substitutions for reducing an effector function of an Fc.

[0034] In some embodiments, the present invention provides a heterodimeric Fc-fused protein comprising a p40 subunit of human IL-12 connected to a first human IgG1 (hIgG1) Fc domain polypeptide by a linker comprising or consisting of an amino acid sequence PKSSDKTHTCPPCPAPEAAGG (SEQ ID NO:239), and a p35 subunit of human IL-12 connected to a second hIgG1 Fc domain polypeptide by a linker comprising or consisting of an amino acid sequence GGGGSGGGGSGGGGSEPKSSDKTHTCPPCPAPEAAGG (SEQ ID NO:10); the first and the second Fc domain polypeptides comprise mutations promoting heterodimerization, and L234A, L235A, and P329A substitutions for reducing an effector function of a hIgG1 Fc.

[0035] In one aspect the present invention provides a heterodimeric Fc-fused protein comprising: a first polypeptide comprising a first antibody Fc domain polypeptide and a second polypeptide comprising a second antibody Fc domain polypeptide, in which the first polypeptide further comprises a first subunit of a multisubunit protein, in which the protein sequence is fused by a linker comprising amino acid sequence RVESKYGPPCPPCPAPEFXGG (SEQ ID NO:1) to the first antibody Fc domain polypeptide, in which X represents L or E; a second, different subunit of the multisubunit protein is fused to the second antibody Fc domain polypeptide, and the subunits of the multisubunit protein are bound to each other, the first antibody Fc domain polypeptide and the second antibody Fc domain polypeptide each contain different mutations promoting heterodimerization, and the first antibody Fc domain polypeptide and the second antibody Fc domain polypeptide are bound to each other.

[0036] In some embodiments, a heterodimeric Fc-fused protein of the present invention comprises a first polypeptide comprising a first antibody Fc domain polypeptide and a second polypeptide comprising a second antibody Fc domain polypeptide, in which the first polypeptide further comprises a first subunit of a multisubunit protein, in which the protein sequence is fused by a linker to the first antibody Fc domain polypeptide; and the second polypeptide further comprises a second, different subunit of a multisubunit protein, in which the protein sequence is fused by a linker to the second antibody Fc domain polypeptide. The linker connecting the protein sequence of the second, different subunit of a multisubunit protein to the second antibody Fc domain polypeptide may include G45 (SEQ ID NO:110), (G45)₂ (SEQ ID NO:109), or (G4S)₃ (SEQ ID NO:108).

[0037] In some embodiments, within the heterodimeric Fc-fused protein, the linker connecting the subunit of the multisubunit protein to the first antibody Fc domain polypeptide comprises amino acid sequence RVESKYGPPCPPCPAPEFLGG (SEQ ID NO:2). In some embodiments, the linker fusing the first subunit of the multisubunit protein to the first antibody Fc domain polypeptide consists of amino acid sequence RVESKYGPPCPPCPAPEFLGG (SEQ ID NO:2).

[0038] In some embodiments, the second, different subunit of the multisubunit protein is fused to the second antibody Fc domain polypeptide by a linker comprising amino acid sequence GGGGSGGGGSGGGGSRVESKYGPPCPPCPAPEFLGG (SEQ ID NO:3). In some embodiments, the second, different subunit of the multisubunit protein is fused to the second antibody Fc domain polypeptide by a linker consisting of amino acid sequence GGGGSGGGGSGGGGSRVESKYGPPCPPCPAPEFLGG (SEQ ID NO:3).

[0039] In some embodiments, the second, different subunit of the multisubunit protein is fused to the second antibody Fc domain polypeptide by a linker comprising amino acid sequence GGGGSRVESKYGPPCPPCPAPEFLGG (SEQ ID NO:13). In some embodiments, the second, different subunit of the multisubunit protein is fused to the second antibody Fc domain polypeptide by a linker consisting of amino acid sequence GGGGSRVESKYGPPCPPCPAPEFLGG (SEQ ID NO:13).

[0040] In some embodiments, the second, different subunit of the multisubunit protein is fused to the second antibody Fc domain polypeptide by a linker comprising amino acid sequence GGGGSGGGGSRVESKYGPPCPPCPAPEFLGG (SEQ ID NO:14). In some embodiments, the second, different subunit of the multisubunit protein is fused to the second antibody Fc domain polypeptide by a linker consisting of amino acid sequence GGGGSGGGGSRVESKYGPPCPPCPAPEFLGG (SEQ ID NO:14).

[0041] In some embodiments, within the heterodimeric Fc-fused protein, the linker connecting the subunit of the multisubunit protein to the first antibody Fc domain polypeptide comprises amino acid sequence RVESKYGPPCPPCPAPEFEGG (SEQ ID NO:4). In some embodiments, the linker fusing the first subunit of the multisubunit protein to the first antibody Fc domain polypeptide consists of amino acid sequence RVESKYGPPCPPCPAPEFEGG (SEQ ID NO:4).

[0042] In some embodiments, the second, different subunit of the multisubunit protein is fused to the second antibody Fc domain polypeptide by a linker comprising amino acid sequence GGGGSGGGGSGGGGSRVESKYGPPCPPCPAPEFEGG (SEQ ID NO:5). In some embodiments, the second, different subunit of the multisubunit protein is fused to the second antibody Fc domain polypeptide by a linker consisting of amino acid sequence GGGGSGGGGSGGGGSRVESKYGPPCPPCPAPEFEGG (SEQ ID NO:5).

[0043] In some embodiments, the second, different subunit of the multisubunit protein is fused to the second antibody Fc domain polypeptide by a linker comprising amino acid sequence GGGGSRVESKYGPPCPPCPAPEFEGG (SEQ ID NO:63). In some embodiments, the second, different subunit of the multisubunit protein is fused to the second antibody Fc domain polypeptide by a linker consisting of amino acid sequence GGGGSRVESKYGPPCPPCPAPEFEGG (SEQ ID NO:63).

[0044] In some embodiments, the second, different subunit of the multisubunit protein is fused to the second antibody Fc domain polypeptide by a linker comprising amino acid sequence GGGGSGGGGSRVESKYGPPCPPCPAPEFEGG (SEQ ID NO:64). In some embodiments, the second, different subunit of the multisubunit protein is fused to the second antibody Fc domain polypeptide by a linker consisting of amino acid sequence GGGGSGGGGSRVESKYGPPCPPCPAPEFEGG (SEQ ID NO:64).

[0045] Some heterodimeric Fc-fused proteins described herein include a first IgG4 antibody Fc domain polypeptide and a second, different IgG4 antibody Fc domain polypeptide, each mutated to promote heterodimerization with each other. In some embodiments, the first IgG4 antibody Fc domain polypeptide includes one or more mutation(s) selected from K370E and R409W, and the second, different IgG4 antibody Fc domain polypeptide includes one or more mutation(s) selected from E357N, D399V, and F405T. In some embodiments, the first IgG4 antibody Fc domain polypeptide includes one or more mutation(s) selected from E357N, D399V, and F405T, and the second, different IgG4 antibody Fc domain polypeptide includes one or more mutation(s) selected from K370E and R409W. In some embodiments, the first IgG4 antibody Fc domain polypeptide includes mutations K370E and R409W, and the second, different IgG4 antibody Fc domain polypeptide includes mutations E357N, D399V, and F405T. In some embodiments, the first IgG4 antibody Fc domain polypeptide includes mutations E357N, D399V, and F405T, and the second, different IgG4 antibody Fc domain polypeptide includes mutations K370E and R409W. In some embodiments, the first IgG4 Fc domain polypeptide includes one or more mutation(s) selected from K360E and R409W, and the second, different IgG4 Fc domain polypeptide includes one or more mutation(s) selected from Q347R, D399V, and F405T. In some embodiments, the first IgG4 Fc domain polypeptide includes one or more mutation(s) selected from Q347R, D399V, and F405T, and the second, different IgG4 Fc domain polypeptide includes one or more mutation(s) selected from K360E and R409W. In some embodiments, the first IgG4 Fc domain polypeptide includes mutations K360E and R409W, and the second, different IgG4 Fc domain polypeptide includes mutations Q347R, D399V, and F405T. In some embodiments, the first IgG4 Fc domain polypeptide includes mutations Q347R, D399V, and F405T, and the second, different IgG4 Fc domain polypeptide includes mutations K360E and R409W.

[0046] Some heterodimeric Fc-fused proteins disclosed herein include a first IgG1 antibody Fc domain polypeptide and a second, different IgG1 antibody Fc domain polypeptide, each mutated to promote heterodimerization with each other. In some embodiments, the first IgG1 Fc domain polypeptide includes one or more mutation(s) selected from K360E and K409W, and the second, different IgG1 Fc domain polypeptide includes one or more mutation(s) selected from Q347R, D399V, and F405T. In some embodiments, the first IgG1 Fc domain polypeptide includes one or more mutation(s) selected from Q347R, D399V, and F405T, and the second, different IgG1 Fc domain polypeptide includes one or more mutation(s) selected from K360E and K409W. In some embodiments, the first IgG1 antibody Fc domain polypeptide includes mutations K360E and K409W, and the second, different IgG1 antibody Fc domain polypeptide includes mutations Q347R, D399V, and F405T. In some embodiments, the first IgG1 antibody Fc domain polypeptide includes mutations Q347R, D399V, and F405T, and the second, different IgG1 antibody Fc domain polypeptide includes mutations K360E and K409W.

[0047] In some embodiments, a heterodimeric Fc-fused protein described herein comprises IgG4 or IgG1 Fc domain polypeptides further mutated to reduce effector functions. In some embodiments, the first antibody Fc domain polypeptide and the second antibody Fc domain polypeptide each contain the mutation P329G or P329A. In some embodiments, the first IgG4 antibody Fc domain polypeptide and the second, different IgG4 antibody Fc domain polypeptide each contain the mutation P329G or P329A. In some embodiments, the first IgG1 antibody Fc domain polypeptide and the second, different IgG1 antibody Fc domain polypeptide each contain the mutation P329G or P329A. In some embodiments, the first IgG4 antibody Fc domain polypeptide and the second, different IgG4 antibody Fc domain polypeptide each contain the mutation P329A. In some embodiments, the first IgG1 antibody Fc domain polypeptide and the second, different IgG1 antibody Fc domain polypeptide each contain the mutation P329A.

[0048] In some embodiments, a heterodimeric Fc-based fusion described herein incorporates a first IgG1 antibody Fc domain polypeptide and a second, different IgG1 antibody Fc domain polypeptide each containing a mutation selected from A330S and P331S. In some embodiments, a heterodimeric Fc-based fusion described herein incorporates a first IgG1 antibody Fc domain polypeptide and a second, different IgG1 antibody Fc domain polypeptide each containing the mutations A330S and P331S.

[0049] In some embodiments, a heterodimeric Fc-based protein described herein incorporates IgG4 or IgG1 Fc domain polypeptides that are further mutated to introduce an inter-chain disulfide bond. In some embodiments, the first IgG4 or IgG1 Fc domain polypeptide includes mutation Y349C, and the second, different IgG4 or IgG1 Fc domain polypeptide includes mutation S354C. In some embodiments, the first IgG4 or IgG1 Fc domain polypeptide includes mutation S354C, and the second, different IgG4 or IgG1 Fc domain polypeptide includes mutation Y349C.

[0050] Some heterodimeric Fc-fused proteins of the present invention include a native disulfide bond between the first subunit of a multisubunit protein and the second, different subunit of the multisubunit protein. For example, in an exemplary embodiment, a heterodimeric Fc-fused protein according to the invention includes a native heterodimer disulfide bond between p35 and p40 subunits of IL-12. Such a protein includes the native disulfide bond between C74 of p35 and C177 of p40.

[0051] Some heterodimeric Fc-fused proteins of the present invention include an artificial or engineered heterodimer disulfide bond between the first subunit of a multisubunit protein and the second, different subunit of the multisubunit protein. For example, in an exemplary embodiment, a heterodimeric Fc-fused protein according to the invention includes an artificial or engineered heterodimer disulfide bond between p35 and p40 subunits of IL-12. Such a protein includes an artificial or engineered disulfide bond between V185C of p35 and Y292C of p40.

[0052] Some heterodimeric Fc-fused proteins of the present invention include a native disulfide bond between the first subunit of a multisubunit protein and the second, different subunit of the multisubunit protein, and an artificial or engineered heterodimer disulfide bond between the first subunit of a multisubunit protein and the second, different subunit of the multisubunit protein. For example, in an exemplary embodiment, a native heterodimer disulfide bond between p35 and p40 subunits of IL-12, and includes an artificial or engineered heterodimer disulfide bond between p35 and p40 subunits of IL-12. Such a protein includes the native disulfide bond between C74 of p35 and C177 of p40, and an artificial or engineered disulfide bond between V185C of p35 and Y292C of p40.

[0053] Some heterodimeric Fc-fused proteins of the present invention are engineered to remove a native disulfide bond, and then substituted with a non-native artificial or engineered disulfide bond. For example, in an exemplary embodiment, a heterodimeric Fc-fused protein according to the invention includes p35 of IL-12 in which the native C74 is mutated to serine, and a p40 of 11-12 in which the native C177 is mutated to serine, thereby removing the native disulfide bond between p35 and p40 subunits of IL-12. To this mutated IL-12, two new mutations are introduced, V185C on p35 and Y292C on p40, thereby introducing a non-native artificial or engineered disulfide bond.

[0054] Within a heterodimeric Fc-fused protein of the present invention, a first polypeptide and a second, different polypeptide comprise a first subunit and a second, different subunit of a multisubunit cytokine, respectively. Within a heterodimeric Fc-fused protein of the present invention, a first polypeptide and a second, different polypeptide comprise a second, different subunit and a first subunit of a multisubunit cytokine, respectively. In an exemplary embodiment, the cytokine is IL-12 (e.g., human IL-12). Formulations containing any one of the heterodimeric Fc-fused proteins described herein, cells containing one or more nucleic acid(s) expressing the heterodimeric Fc-fused proteins or vector(s) expressing the heterodimeric Fc-fused protein, and methods of enhancing tumor cell death using the heterodimeric Fc-fused proteins are also provided. In some embodiments, the invention provides a formulation that includes a heterodimeric Fc-fused protein described herein and a pharmaceutically acceptable carrier.

[0055] In another aspect, a heterodimeric Fc-fused protein of the present invention further comprises at least one antibody variable domain (e.g., an antibody heavy chain variable domain). In certain embodiments, the at least one antibody heavy chain variable domain binds to an antibody light chain variable region to form an Fab, and the heavy chain variable domain or the light chain variable domain of the Fab is fused at the N-terminus of the first antibody Fc domain polypeptide and/or the second antibody Fc domain polypeptide.

[0056] In certain embodiments, the heterodimeric Fc-fused protein comprising at least one antibody variable domain of the present invention has a first subunit of a multisubunit protein and a second, different subunit of the multisubunit protein connected to the C-terminus of the first antibody Fc domain polypeptide and the second antibody Fc domain polypeptide, respectively.

[0057] In certain embodiments, the heterodimeric Fc-fused protein comprising at least one antibody variable domain of the present invention has a first subunit of a multisubunit protein and a second, different subunit of the multisubunit protein connected to the C-terminus of the second antibody Fc domain polypeptide and the first antibody Fc domain polypeptide, respectively.

[0058] In certain embodiments, a heterodimeric Fc-fused protein of the present invention comprises an antibody heavy chain variable domain positioned at the C-terminus to the first antibody Fc domain polypeptide of the first polypeptide. In certain embodiments, a heterodimeric Fc-fused protein of the present invention comprises an antibody heavy chain variable domain positioned C-terminally to the second antibody Fc domain polypeptide of the second polypeptide. In certain embodiments, the antibody heavy chain variable region binds to an antibody light chain variable region to form an scFv. In certain embodiments, a first subunit of a multisubunit protein and the second, different subunit of the multisubunit protein are connected to the N-terminus of the first antibody Fc domain polypeptide and the second antibody Fc domain polypeptide, respectively. In certain embodiments, a first subunit of a multisubunit protein and the second, different subunit of the multisubunit protein are connected to the N-terminus of the second antibody Fc domain polypeptide and the first antibody Fc domain polypeptide, respectively.

[0059] In some embodiments, a heterodimeric Fc-fused protein of the present invention does not comprise an antibody variable domain. For example, in some embodiments, the heterodimeric Fc-fused protein consists of or consists essentially of a first subunit of a multisubunit protein (e.g., an IL-12 protein), a linker optionally comprising a spacer peptide, and a first antibody Fc domain polypeptide; and a second, different subunit of the multisubunit protein (e.g., an IL-12 protein), a linker optionally comprising a spacer peptide, and a second antibody Fc domain polypeptide.

[0060] In some embodiments, a heterodimeric Fc-fused protein of the present invention further comprises a proteoglycan-binding domain. In some embodiments, the proteoglycan-binding domain binds one or more proteoglycans that are specifically expressed in a tumor. In some embodiments, the proteoglycan-binding domain binds one or more proteoglycans selected from syndecan, serglycin, CSPG4, betaglycan, glypican, perlecan, versican, brevican, and small leucine-rich proteoglycans (SLRPs). In some embodiments, the SLRPs are selected from decorin, biglycan, asporin, fibrodulin, and lumican. In some embodiments, the proteoglycan-binding domain is linked to the C-terminus of the first antibody Fc domain polypeptide. In some embodiments, the proteoglycan-binding domain is linked to the C-terminus of the second antibody Fc domain polypeptide.

[0061] In some embodiments, a heterodimeric Fc-fused protein of the present invention further comprises a collagen-binding domain. In some embodiments, the collagen-binding domain binds one or more collagens that are specifically expressed in a tumor. In some embodiments, the collagen-binding domain is linked to the C-terminus of the first antibody Fc domain polypeptide. In some embodiments, the collagen-binding domain is linked to the C-terminus of the second antibody Fc domain polypeptide.

[0062] In some embodiments, a heterodimeric Fc-fused protein of the present invention further comprises a hyaluronic acid-binding domain. In some embodiments, the hyaluronic acid-binding domain is linked to the C-terminus of the first antibody Fc domain polypeptide. In some embodiments, the hyaluronic acid-binding domain is linked to the C-terminus of the second antibody Fc domain polypeptide.

[0063] Another aspect of the invention provides a method of treating cancer in a patient. The method comprises administering to a patient, for example, a patient in need thereof, an effective amount of a heterodimeric Fc-fused protein described herein or a formulation that includes an effective amount of a multi-specific binding protein described herein. For example, in some embodiments, the method of treating cancer includes administering to a patient, for example, a patient in need of treatment, a formulation that includes an effective amount of a heterodimeric Fc-fused protein described herein and a pharmaceutically acceptable carrier.

[0064] In certain embodiments, the present disclosure provides a method of treating cancer, the method comprising administering to a patient only a single dose of a heterodimeric IL-12-Fc-fused protein. In certain embodiments, the single dose is in an amount sufficient to induce a complete response to the cancer. In certain embodiments, the single dose is in an amount sufficient to delay or prevent recurrence of the cancer.

[0065] In certain embodiments, the present disclosure provides a method of treating cancer, the method comprising administering to a patient only a single dose of a heterodimeric IL-12-Fc-fused protein comprising a first polypeptide comprising the amino acid sequence of SEQ ID NO:290 and a second polypeptide comprising the amino acid sequence of SEQ ID NO:291, or a formulation comprising the heterodimeric IL-12-Fc-fused protein and a pharmaceutically acceptable carrier. In certain embodiments, a single dose of a heterodimeric IL-12-Fc-fused protein comprising a first polypeptide comprising the amino acid sequence of SEQ ID NO:290 and a second polypeptide comprising the amino acid sequence of SEQ ID NO:291, or a formulation comprising the heterodimeric IL-12-Fc-fused protein and a pharmaceutically acceptable carrier is in an amount sufficient to induce a complete response to the cancer. In certain embodiments, the single dose is in an amount sufficient to delay or prevent recurrence of the cancer.

[0066] Another aspect of the invention provides a method of treating acute radiation syndrome, wherein the method comprises administering a heterodimeric Fc-fused protein or a formulation disclosed herein to a patient. In some embodiments, the acute radiation syndrome comprises one or more syndrome(s) selected from hematopoietic radiation syndrome, gastrointestinal radiation syndrome, neurovascular radiation syndrome, and cutaneous radiation syndrome. In some embodiments, the acute radiation syndrome comprises a syndrome selected from the group consisting of hematopoietic radiation syndrome, gastrointestinal radiation syndrome, neurovascular radiation syndrome, and cutaneous radiation syndrome.

[0067] In summary, the present invention provides heterodimeric Fc-fused protein constructs of multisubunit proteins. These fusion protein constructs can exhibit a higher serum half-life compared to a native/natural multisubunit protein, improved yield during production, enhanced stability during storage, and/or improved efficacy when used as a therapeutic.

### BRIEF DESCRIPTION OF THE DRAWINGS

[0068] FIG. 1A illustrates an exemplary heterodimeric Fc-fused protein comprising a first subunit of a multisubunit protein connected by a linker to a first antibody Fc domain polypeptide, and a second, different subunit of a multisubunit protein connected by a linker to a second antibody Fc domain polypeptide. The first antibody Fc domain polypeptide and the second antibody Fc domain polypeptide each contain different mutations promoting heterodimerization, and a disulfide bond between the Fc domain polypeptides stabilizes the heterodimer. The linker connecting the additional subunit to the second antibody Fc domain polypeptide may include (G4S)₃ sequence (SEQ ID NO:108).

[0069] FIG. 1B illustrates an exemplary heterodimeric Fc-fused protein similar to the protein illustrated in FIG. 1A, but also including mutations in the Fc domain polypeptide to reduce FcγR binding.

[0070] FIG. 1C illustrates an exemplary protein in which the second, different subunit of the multisubunit protein is connected by a linker to the first antibody Fc domain polypeptide, and the other subunit of the multisubunit protein is connected by another linker to the second antibody Fc domain polypeptide.

[0071] FIG. 1D illustrates an exemplary heterodimeric Fc-fused protein similar to the protein illustrated in FIG. 1C, but also including mutations in the Fc domain polypeptide to reduce FcγR binding.

[0072] FIG. 1E illustrates an exemplary heterodimeric Fc-fused protein similar to the protein illustrated in FIG. 1B, except that the second, different subunit of a multisubunit protein is positioned at the C-terminus of the second antibody Fc domain polypeptide in the second polypeptide.

[0073] FIG. 1F illustrates an exemplary heterodimeric Fc-fused protein similar to the protein illustrated in FIG. 1E, except that the second, different subunit of a multisubunit protein is positioned at the C-terminus of the first antibody Fc domain polypeptide in the first polypeptide.

[0074] FIG. 2A illustrates an exemplary heterodimeric Fc-fused protein comprising a first subunit of a multisubunit protein connected by a linker to a first antibody Fc domain polypeptide, and a second, different subunit of a multisubunit protein connected by another linker to a second antibody Fc domain polypeptide, in which the subunits are connected by two disulfide bonds. The first antibody Fc domain polypeptide and the second antibody Fc domain polypeptide each contain different mutations promoting heterodimerization, and a disulfide bond between the Fc domain polypeptides stabilizes the heterodimer. The illustrated protein also includes mutations in the Fc domain polypeptide to reduce FcγR binding.

[0075] FIG. 2B illustrates an exemplary heterodimeric Fc-fused protein comprising a first subunit of a multisubunit protein connected by a linker to a first antibody Fc domain polypeptide, and a second, different subunit of a multisubunit protein connected by another linker to a second antibody Fc domain polypeptide, in which the subunits are connected by one non-native disulfide bond. In the exemplary protein shown, the native disulfide bond has been removed and replaced with an artificial disulfide bond. For example, an IL-12 construct can incorporate mutations p35-V185C/C74S and p40-Y292C/C177S. The first antibody Fc domain polypeptide and the second antibody Fc domain polypeptide each contain different mutations promoting heterodimerization, and a disulfide bond between the Fc domain polypeptides stabilizes the heterodimer. The protein also includes mutations in the Fc domain polypeptide to reduce FcγR binding.

[0076] FIG. 3A illustrates an exemplary heterodimeric Fc-fused protein comprising a first subunit of a multisubunit protein connected by a linker to a first antibody Fc domain polypeptide, and a second, different subunit of a multisubunit protein connected by another linker having the same amino acid sequence to a second antibody Fc domain polypeptide. The first antibody Fc domain polypeptide and the second antibody Fc domain polypeptide each contain different mutations promoting heterodimerization, and a disulfide bond between the Fc domain polypeptides stabilizes the heterodimer.

[0077] FIG. 3B illustrates an exemplary heterodimeric Fc-fused protein comprising a first subunit of a multisubunit protein connected by a linker to a first antibody Fc domain polypeptide, and a second, different subunit of a multisubunit protein connected by another linker to a second antibody Fc domain polypeptide. The first antibody Fc domain polypeptide and the second antibody Fc domain polypeptide each contain different mutations promoting heterodimerization, and a disulfide bond between the Fc domain polypeptides stabilizes the heterodimer. The linker connecting the second, different subunit of the multisubunit protein to the second antibody Fc domain polypeptide may include a (G4S)₂ (SEQ ID NO:109) or G45 (SEQ ID NO:110) sequence.

[0078] FIGS. 4A-4L illustrate exemplary scFv fusion heterodimeric Fc-fused protein constructs (FIGS. 4A-4H), and mAb fusion heterodimeric Fc-fused protein constructs (FIGS. 4I-4L) in which a first subunit of a multisubunit protein is connected by a linker to a first antibody Fc domain polypeptide, and a second, different subunit of a multisubunit protein is connected by another linker to a second antibody Fc domain polypeptide.

[0079] FIGS. 4A-4D illustrate exemplary Fc-fused proteins including a first scFv linked to the C-terminus of the first antibody Fc domain polypeptide and a second scFv linked to the C-terminus of the second antibody Fc domain polypeptide. The first scFv and the second scFv can be the same or different (e.g., bind to different antigens or different epitopes on a single antigen). The exemplary Fc-fused proteins illustrated in FIG. 4A and FIG. 4C comprise different pairs of heterodimerization Fc variants. The exemplary Fc-fused proteins illustrated in FIG. 4B and FIG. 4D comprise different pairs of heterodimerization Fc variants. For example, where the heterodimerization mutations include “knobs-into-holes” mutations, FIG. 4A and FIG. 4D illustrate exemplary Fc-fused proteins in which the first polypeptide comprises “hole” mutation(s) and the second polypeptide comprises “knob” mutation(s); FIG. 4B and FIG. 4C illustrate exemplary Fc-fused proteins in which the first polypeptide comprises “knob” mutation(s) and the second polypeptide comprises “hole” mutation(s). FIG. 4A and FIG. 4B illustrate exemplary Fc-fused proteins in which the protein sequence of a first subunit of a multisubunit protein is connected to the first polypeptide; FIG. 4C and FIG. 4D illustrate exemplary Fc-fused proteins in which the second, different subunit of the multisubunit protein is connected to the first polypeptide. Heterodimeric Fc-fused proteins with other types of heterodimerization mutations are similarly contemplated.

[0080] FIGS. 4E and 4G illustrate exemplary Fc-fused proteins including an scFv linked to the C-terminus of the first antibody Fc domain polypeptide.

[0081] FIGS. 4F and 4H illustrate exemplary Fc-fused proteins including an scFv linked to the C-terminus of the second antibody Fc domain polypeptide.

[0082] FIGS. 4I-4L illustrate exemplary Fc-fused proteins including a first Fab linked to the N-terminus of the first antibody Fc domain polypeptide and a second Fab linked to the N-terminus of the second antibody Fc domain polypeptide. FIG. 4I and FIG. 4K illustrate exemplary Fc-fused proteins in which a first subunit of a multisubunit protein is connected to the first polypeptide; FIG. 4J and FIG. 4L illustrate exemplary Fc-fused proteins in which the second, different subunit of the multisubunit protein is connected to the first polypeptide. FIG. 4K differs from FIG. 4I in having a longer amino acid sequence (e.g., spacer peptide disclosed herein) that connects the antibody Fc domain polypeptide and the a first subunit of a multisubunit protein; FIG. 4J differs from FIG. 4L in having a longer amino acid sequence (e.g., spacer peptide disclosed herein) that connects the antibody Fc domain polypeptide and the first subunit of a multisubunit protein.

[0083] FIGS. 5A-5C are graphs showing tumor growth curves of individual mice inoculated with CT26 tumor cells and treated with recombinant mouse IL-12 (rmIL-12)(FIG. 5A), DF-mIL-12-Fc wt (FIG. 5B), DF-mIL-12-Fc si (FIG. 5C), or mIgG2a isotype control once a week.

[0084] FIG. 6 is a graph showing Kaplan-Meier survival curves of mice inoculated with CT26 tumor cells and treated with rmIL-12, DF-mIL-12-Fc wt, DF-mIL-12-Fc si, or mIgG2a isotype control once a week.

[0085] FIGS. 7A-7D are graphs showing tumor growth curves of individual mice inoculated with CT26 tumor cells and treated with DF-mIL-12-Fc wt at a molar equivalent of 1 μg rmIL-12 (FIG. 7A), DF-mIL-12-Fc si at a molar equivalent of 1 μg rmIL-12 (FIG. 7B), DF-mIL-12-Fc wt at a molar equivalent of 0.1 μg rmIL-12 (FIG. 7C), DF-mIL-12-Fc si at a molar equivalent of 0.1 μg rmIL-12 (FIG. 7D), or mIgG2a isotype control once a week.

[0086] FIG. 8 is a graph showing Kaplan-Meier survival curves of mice inoculated with CT26 tumor cells and treated with DF-mIL-12-Fc wt at a molar equivalent of 1 μg rmIL-12, DF-mIL-12-Fc si at a molar equivalent of 1 μg rmIL-12, DF-mIL-12-Fc wt at a molar equivalent of 0.1 μg rmIL-12, DF-mIL-12-Fc si at a molar equivalent of 0.1 μg rmIL-12, or mIgG2a isotype control once a week.

[0087] FIGS. 9A-9C are graphs showing tumor growth curves of individual mice inoculated with B16F10 melanoma cells and treated with rmIL-12 (FIG. 9A), DF-mIL-12-Fc wt (FIG. 9B), DF-mIL-12-Fc si (FIG. 9C), or mIgG2a isotype control once a week.

[0088] FIG. 10 is a graph showing Kaplan-Meier survival curves of mice inoculated with B16F10 melanoma cells and treated with rmIL-12, DF-mIL-12-Fc wt, DF-mIL-12-Fc si, or mIgG2a isotype control once a week.

[0089] FIGS. 11A-11D are graphs showing tumor growth curves of individual mice inoculated with B16F10 melanoma cells and treated with DF-mIL-12-Fc wt at a molar equivalent of 0.5 μg rmIL-12 (FIG. 11A), DF-mIL-12-Fc si at a molar equivalent of 0.5 μg rmIL-12 (FIG. 11B), DF-mIL-12-Fc wt at a molar equivalent of 0.1 μg rmIL-12 (FIG. 11C), DF-mIL-12-Fc si at a molar equivalent of 0.1 μg rmIL-12 (FIG. 11D), or mIgG2a isotype control once a week.

[0090] FIG. 12 is a graph showing Kaplan-Meier survival curves of mice inoculated with B16F10 melanoma cells and treated with DF-mIL-12-Fc wt at a molar equivalent of 0.5 μg rmIL-12, DF-mIL-12-Fc si at a molar equivalent of 0.5 μg rmIL-12, DF-mIL-12-Fc wt at a molar equivalent of 0.1 μg rmIL-12, DF-mIL-12-Fc si at a molar equivalent of 0.1 μg rmIL-12, or mIgG2a isotype control once a week.

[0091] FIG. 13A is a graph showing IL-12 response to treatment with DF-hIL-12-Fc si (DF IL-12-Fc) or recombinant human IL-12 (rhIL-12) using a HEK-Blue IL-12 reporter assay.

[0092] FIG. 13B is a graph showing IFNγ production by peripheral blood mononuclear cells (PBMCs) in response to treatment with DF-hIL-12-Fc si (DF IL-12-Fc) and rhIL-12.

[0093] FIG. 14 is a graph showing the relative plasma concentrations of DF-hIL-12-Fc si, rhIL-12, and IFNγ in cynomolgus monkey K2 EDTA plasma following a single intravenous dose of equimolar amounts of DF-hIL-12-Fc si or wild type rhIL-12 at 10 μg/kg.

[0094] FIGS. 15A-15B are graphs showing the PK/PD profile of rmIL-12 (FIG. 15A) and DF-mIL-12-Fc si (FIG. 15B) in naïve Balb/c mice. FIG. 15A shows the PK/PD profile of rmIL-12 in naïve Balb/c mice and FIG. 15B shows the PK/PD profile of DF-mIL-12-Fc si in naïve Balb/c micelL-12. IL-12 and IFNγ levels in serum were analyzed by ELISA. FIG. 15C is a graph showing the PK/PD profile of DF-mIL-12-Fc si administered intravenously in naïve Balb/c mice. FIG. 15D is a graph showing the PK/PD profile of DF-mIL-12-Fc si administered intraperitoneally in naïve Balb/c mice. FIG. 15E is a graph showing the PK/PD profile of DF-mIL-12-Fc si administered subcutaneously in naïve Balb/c mice. Average serum levels represent the mean±SEM.

[0095] FIGS. 16A-16C are graphs showing tumor growth curves of B16F10 tumor-bearing mice treated with DF-mIL-12-Fc si, anti-PD-1, or a combination thereof. Mice were treated intraperitoneally with 0.5 μg isotype control or 0.5 μg DF-mIL-12-Fc si (FIG. 16A), isotype control or anti-PD-1 (FIG. 16B), and isotype control or DF-mIL-12-Fc si/anti-PD-1 (FIG. 16C). Animals were injected once a week with DF-mIL-12-Fc si and twice weekly with anti-PD-1 as indicated above. Tumor growth was assessed for 60 days. Graphs show tumor growth curves of individual mice.

[0096] FIGS. 17A-17B are graphs showing survival and body weights of B16F10 tumor-bearing mice treated DF-mIL-12-Fc si, anti-PD-1, or a combination thereof. Mice were treated with isotype, DF-mIL-12-Fc si, anti-PD-1 or in combination of DF-mIL-12-Fc si and anti-PD-1. Animals were injected once a week with 0.5 μg DF-mIL-12-Fc si and twice weekly with 200 μg anti-PD-1 or isotype. FIG. 17A shows Kaplan-Meier survival curves. FIG. 17B shows body weights of mice as averages±standard deviation.

[0097] FIGS. 18A-18C are graphs showing tumor growth curves of B16F10 tumor-bearing mice treated DF-mIL-12-Fc si, mcFAE-C26.99 TriNKETs, or a combination thereof. Mice were treated intraperitoneally with 150 μg isotype control or 0.5 μg DF-mIL-12-Fc si (FIG. 18A), isotype control or 150 μg TriNKET (FIG. 18B), and isotype control or DF-mIL-12-Fc si/TriNKET (FIG. 18C). Animals were injected once a week with DF-mIL-12-Fc si and thrice weekly with TriNKET as indicated above. Tumor growth was assessed for 72 days. Graphs show tumor growth curves of individual mice.

[0098] FIGS. 19A-19B are graphs showing survival and body weights of B16F10 tumor-bearing mice treated with DF-mIL-12-Fc si, mcFAE-C26.99 TriNKETs, or a combination thereof. Mice were treated with isotype, DF-mIL-12-Fc si, TriNKET, or a combination of DF-mIL-12-Fc si and TriNKET. Animals were injected once a week with 0.5 μg DF-mIL-12-Fc si and thrice weekly with 150 μg TriNKET or isotype. FIG. 19A shows Kaplan-Meier survival curves. FIG. 19B shows body weights of mice as averages+standard deviation.

[0099] FIG. 20 is a graph showing tumor growth curves of complete responder (CR) mice from the B16F10 tumor model experiment of FIG. 18 treated with DF-mIL-12-Fc si/TriNKET combination therapy (n=3), re-challenged by engraftment with 2×10⁵ B16F10 melanoma cells.

[0100] FIG. 21A is a graph showing tumor growth curves of individual mice inoculated with CT26 tumor cells and administered a single dose of DF-mIL-12-Fc si or mIgG2a isotype.

[0101] FIG. 21B is a graph showing body weights±standard deviation of mice inoculated with CT26 tumor cells and administered a weekly dose of DF-mIL-12-Fc si, mIgG2a isotype, or rmIL-12.

[0102] FIG. 21C is a graph showing tumor growth curves of re-challenged individual mice that were either naïve or complete responders (CR) when previously administered a single dose of DF-mIL-12-Fc si in a CT26 tumor model.

[0103] FIGS. 22A-22B are graphs showing tumor growth curves of individual mice inoculated with CT26 tumor cells and administered a weekly dose of DF-mIL-12-Fc si or mIgG2a isotype either intraperitoneally (IP)(FIG. 22A) or subcutaneously (SC) (FIG. 22B).

[0104] FIG. 23 is a graph showing tumor growth curves of individual mice inoculated with B16F10 melanoma cells and administered a single dose of DF-mIL-12-Fc si or mIgG2a isotype.

[0105] FIGS. 24A-24B are graphs showing tumor growth curves of individual mice inoculated with B16F10 melanoma cells and administered a weekly dose of DF-mIL-12-Fc si or mIgG2a isotype either intraperitoneally (IP) (FIG. 24A) or subcutaneously (SC) (FIG. 24B).

[0106] FIGS. 25A-25B are graphs showing tumor growth curves of individual mice inoculated with CT26 tumor cells and administered a single dose (FIG. 25A) or once weekly dose (FIG. 25B) of DF-mIL-12-Fc si or mIgG2A isotype intraperitoneally at a molar equivalent of 1 μg of rmIL-12.

[0107] FIGS. 26A-26B are graphs showing tumor growth curves of individual mice inoculated with CT26 tumor cells and administered a once weekly dose of DF-mIL-12-Fc si subcutaneously. FIG. 26A is a graph showing tumor growth curves of individual mice inoculated with CT26-Tyrpl tumor cells and treated once (weekly) with either 2 μg mIgG2a isotype control or 1 μg DF-mIL-12-Fc si. FIG. 26B is a graph showing tumor growth curves of individual mice inoculated with CT26-Tyrpl tumor cells and treated once (weekly) with either 2 μg mIgG2a isotype control or 2 μg DF-mIL-12-Fc si.

[0108] FIGS. 27A-27C are graphs showing IFNγ (FIG. 27A), CXCL9 (FIG. 27B), and CXCL10 (FIG. 27C) levels in blood (left) and tumor (right) samples at 72 hours following a single dose of DF-mIL-12-Fc si in C57BL/6 mice bearing B16F10 tumors.

[0109] FIGS. 28A-28C are line graphs showing pharmacokinetics of DF-hIL-12-Fc si in cynomolgus monkeys treated with a single subcutaneous dose of 1 μg/kg (FIG. 28A), 2 μg/kg (FIG. 28B), or 4 μg/kg (FIG. 28C) of DF-hIL-12-Fc si. 2240, 2241, 2740, 2741 denote individual cynomolgus monkey subjects.

[0110] FIGS. 29A-29F are line graphs showing concentrations of IFNγ and IP10/CXCL10 in cynomolgus monkeys treated with a single subcutaneous dose of DF-hIL-12-Fc si. FIGS. 29A, 29C and 29E show IFNγ concentrations/levels of expression in cynomolgus monkeys treated with 1 μg/kg, 2 μg/kg, and 4 μg/kg of DF-hIL-12-Fc si, respectively. FIGS. 29B, 29D and 29F show IP10/CXCL10 concentrations/levels of expression in cynomolgus monkeys treated with 1 μg/kg, 2 μg/kg, and 4 μg/kg of DF-hIL-12-Fc si, respectively. 3240, 3241, 3740, 3741 denote individual cynomolgus monkey subjects.

[0111] FIG. 30 is a graph showing tumor growth curves of individual mice inoculated with breast cancer cells and administered a weekly dose of a monotherapy (isotype control, DF-mIL-12-Fc si, Doxil® (chemotherapy), or irradiated with 10 Gy) or combination therapy (DF-mIL-12-Fc si in combination with Doxil® or radiation).

[0112] FIG. 31A is a graph showing tumor growth curves of individual mice inoculated with CT26-Tyrpl tumor cells and treated (bi-weekly) either with isotype control or anti-PD-1 antibody. FIG. 31B is a graph showing tumor growth curve of Balb/c mice inoculated with CT26-Tyrpl tumor cells and treated (bi-weekly) either with isotype control or anti-PD-1 antibody. FIG. 31B also shows tumor growth curves of individual mice previously treated with anti-PD-1 antibody that were administered anti-PD-1 antibody (bi-weekly) along with weekly treatment of 1 μg of DF-mIL-12-Fc si.

[0113] FIG. 32A is a graph showing tumor growth curves of treated (Tr) tumors inindividual mice inoculated with CT26-Tyrpl tumor cells and intratumorally treated once (weekly) with either isotype control or DF-mIL-12-Fc si. FIG. 32B is a graph showing tumor growth curves of non-treated (NT) CT26-Tyrpl tumors in the individual mice described in FIG. 32A.

[0114] FIG. 33A is a graph showing tumor growth curves of individual mice inoculated with CT26-Tyrpl tumor cells and treated once with either 2 μg mIgG2a isotype control or 2 μg DF-mIL-12-Fc si. FIG. 33B is a graph showing average tumor growth curves of individual mice inoculated with CT26-Tyrpl tumor cells and treated with 2 μg mIgG2a isotype control, 1 μg DF-mIL-12-Fc si (weekly administration), 2 μg DF-mIL-12-Fc si (weekly administration), or 2 μg DF-mIL-12-Fc si (once)

[0115] FIG. 34A is a graph showing IFNγ production of PHA-stimulated PBMCs treated with DF hIL-12-Fc-si having L234A, L235A, and P329A mutations (LALAPA), or L234A, L235A, P329G mutations (LALAPG). FIG. 34B shows flow cytometry histograms of fluorophore-conjugated hIgG1 binding to THP-1 cells in the presence or absence of DF hIL-12-Fc-si having LALAPA mutations, or LALAPG mutations.

### DETAILED DESCRIPTION

[0116] The invention provides improvements on heterodimeric Fc-fused proteins, pharmaceutical compositions comprising such proteins, and therapeutic methods using such proteins and pharmaceutical compositions, including for the treatment of cancer.

[0117] To facilitate an understanding of the present invention, a number of terms and phrases are defined below.

[0118] The terms “a” and “an” as used herein mean “one or more” and include the plural unless the context is inappropriate.

[0119] As used herein, the terms “subject” and “patient” refer to an organism to be treated by the methods and compositions described herein. Such organisms preferably include, but are not limited to, mammals (e.g., murines, simians, equines, bovines, porcines, canines, felines, and the like), and more preferably include humans.

[0120] As used herein, the term “effective amount” refers to the amount of a compound (e.g., a compound of the present invention) sufficient to effect beneficial or desired results (e.g., a desired prophylactic or therapeutic effect). An effective amount can be administered in one or more administration(s), application(s) or dosage(s) and is not intended to be limited to a particular formulation or administration route. As used herein, the term “treating” includes any effect, e.g., lessening, reducing, modulating, ameliorating or eliminating, that results in the improvement of the condition, disease, disorder, and the like, or ameliorating a symptom thereof.

[0121] As used herein, the term “pharmaceutical composition” refers to the combination of an active agent with a carrier, inert or active, making the composition especially suitable for diagnostic or therapeutic use in vivo or ex vivo.

[0122] As used herein, the term “pharmaceutically acceptable carrier” refers to any of the standard pharmaceutical carriers, such as a phosphate buffered saline solution, water, emulsions (e.g., such as an oil/water or water/oil emulsions), and various types of wetting agents. The compositions also can include stabilizers and preservatives. For examples of carriers, stabilizers and adjuvants, see e.g., Martin, Remington's Pharmaceutical Sciences, 15th Ed., Mack Publ. Co., Easton, Pa. [1975].

[0123] As used herein, the term “pharmaceutically acceptable salt” refers to any pharmaceutically acceptable salt (e.g., acid or base) of a compound of the present invention which, upon administration to a subject, is capable of providing a compound of this invention or an active metabolite or residue thereof. As is known to those of skill in the art, “salts” of the compounds of the present invention may be derived from inorganic or organic acids and bases. Exemplary acids include, but are not limited to, hydrochloric, hydrobromic, sulfuric, nitric, perchloric, fumaric, maleic, phosphoric, glycolic, lactic, salicylic, succinic, toluene-p-sulfonic, tartaric, acetic, citric, methanesulfonic, ethanesulfonic, formic, benzoic, malonic, naphthalene-2-sulfonic, benzenesulfonic acid, and the like. Other acids, such as oxalic, while not in themselves pharmaceutically acceptable, may be employed in the preparation of salts useful as intermediates in obtaining the compounds of the invention and their pharmaceutically acceptable acid addition salts.

[0124] Exemplary bases include, but are not limited to, alkali metal (e.g., sodium) hydroxides, alkaline earth metal (e.g., magnesium) hydroxides, ammonia, and compounds of formula NW4⁺, wherein W is C₁₋₄ alkyl, and the like.

[0125] Exemplary salts include, but are not limited to: acetate, adipate, alginate, aspartate, benzoate, benzenesulfonate, bisulfate, butyrate, citrate, camphorate, camphorsulfonate, cyclopentanepropionate, digluconate, dodecylsulfate, ethanesulfonate, fumarate, flucoheptanoate, glycerophosphate, hemisulfate, heptanoate, hexanoate, hydrochloride, hydrobromide, hydroiodide, 2-hydroxyethanesulfonate, lactate, maleate, methanesulfonate, 2-naphthalenesulfonate, nicotinate, oxalate, palmoate, pectinate, persulfate, phenylpropionate, picrate, pivalate, propionate, succinate, tartrate, thiocyanate, tosylate, undecanoate, and the like. Other examples of salts include anions of the compounds of the present invention compounded with a suitable cation such as Nat, NH₄+, and NW4+(wherein W is a C₁₋₄ alkyl group), and the like.

[0126] For therapeutic use, salts of the compounds of the present invention are contemplated as being pharmaceutically acceptable. However, salts of acids and bases that are non-pharmaceutically acceptable may also find use, for example, in the preparation or purification of a pharmaceutically acceptable compound.

[0127] Throughout the description, where compositions are described as having, including, or comprising specific components, or where processes and methods are described as having, including, or comprising specific steps, it is contemplated that, additionally, there are compositions of the present invention that consist essentially of, or consist of, the recited components, and that there are processes and methods according to the present invention that consist essentially of, or consist of, the recited processing steps.

[0128] As a general matter, compositions specifying a percentage are by weight unless otherwise specified. Further, if a variable is not accompanied by a definition, then the previous definition of the variable controls.

### I. Proteins

[0129] The present invention provides Fc-fused protein constructs comprising the amino acid sequences of a multisubunit protein. These fusion protein constructs can exhibit a higher serum half-life compared to a native/natural multisubunit protein, improved yield during production, enhanced stability during storage, and/or improved efficacy when used as a therapeutic.

### IgG1 Fc-Fused Proteins

[0130] In one aspect, the present invention provides a heterodimeric IgG1 Fc-fused protein comprising: a first polypeptide comprising a first antibody IgG1 Fc domain polypeptide and a second polypeptide comprising a second antibody IgG1 Fc domain polypeptide bound to the first antibody Fc domain, in which the first polypeptide further comprises a first subunit of a multisubunit protein fused by a linker comprising amino acid sequence PKSSDKTHTCPPCPAPEX₁X₂GX₃ (SEQ ID NO:237) or EPKSSDKTHTCPPCPAPEX₁X₂GX₃ (SEQ ID NO:6) to the first antibody Fc domain polypeptide, wherein X₁ represents L or A, X₂ represents L, E, or A, and X₃ represents A or G; a second, different subunit of the multisubunit protein is fused to the second antibody Fc domain polypeptide and the subunits of the multisubunit protein are bound to each other; when X₁ represents L and/or X₂ represents L, at least one of the first antibody Fc domain polypeptide and the second antibody Fc domain polypeptide comprises a Q347R mutation for promoting heterodimerization.

[0131] In some embodiments, within the heterodimeric Fc-fused protein, the linker connecting the a first subunit of a multisubunit protein to the first antibody Fc domain polypeptide consists of amino acid sequence PKSSDKTHTCPPCPAPEX₁X₂GX₃ (SEQ ID NO:237) or EPKSSDKTHTCPPCPAPEX₁X₂GX₃ (SEQ ID NO:6), wherein X₁ represents L or A, X₂ represents L, E, or A, and X₃ represents A or G.

[0132] In certain embodiments, the linker connecting the first subunit of a multisubunit protein to the first antibody Fc domain polypeptide further comprises a spacer peptide. In certain embodiments, the linker comprises a sequence of SEQ ID NO:237 or SEQ ID NO:6, and a spacer peptide.

[0133] In certain embodiments, the second, different subunit of the multisubunit protein is fused to the second antibody Fc domain polypeptide by a linker that comprises a sequence PKSSDKTHTCPPCPAPEX₁X₂GX₃ (SEQ ID NO:237) or EPKSSDKTHTCPPCPAPEX₁X₂GX₃ (SEQ ID NO:6), wherein X₁ represents L or A, X₂ represents L, E, or A, and X₃ represents A or G, and a spacer peptide. In certain embodiments, the second, different subunit of the multisubunit protein is fused to the second antibody Fc domain polypeptide by a linker that consists of the amino acid sequence PKSSDKTHTCPPCPAPEX₁X₂GX₃ (SEQ ID NO:237) or EPKSSDKTHTCPPCPAPEX₁X₂GX₃ (SEQ ID NO:6), wherein X₁ represents L or A, X₂ represents L, E, or A, and X₃ represents A or G. In certain embodiments, the amino acid sequence of the linker connecting the second, different subunit of the multisubunit protein to the second antibody Fc domain polypeptide is identical to the amino acid sequence of the linker connecting the subunit of the multisubunit protein to the first antibody Fc domain polypeptide.

[0134] Any spacer peptide described under the heading “Spacer peptides” can be employed. For example, in certain embodiments, the spacer peptide comprises an amino acid sequence set forth in any one of SEQ ID NOs:107-120. In certain embodiments, the spacer peptide consists of an amino acid sequence set forth in any one of SEQ ID NOs:107-120. In certain embodiments, the linker connecting the subunit of a multisubunit protein to the first antibody Fc domain polypeptide consists of, or consists essentially of, a spacer peptide disclosed herein and a peptide having the sequence of SEQ ID NO:237 or SEQ ID NO:6. In certain embodiments, the linker connecting the second, different subunit of the multisubunit protein to the second antibody Fc domain polypeptide consists of, or consists essentially of, a spacer peptide disclosed herein and a peptide having the sequence of SEQ ID NO:237 or SEQ ID NO:6. In certain embodiments, the spacer peptide is N-terminal to the either or both of the linkers.

[0135] In some embodiments, within the heterodimeric Fc-fused protein, the linker connecting the first subunit of the multisubunit protein to the first antibody Fc domain polypeptide comprises amino acid sequence PKSSDKTHTCPPCPAPEAAGG (SEQ ID NO:239) or EPKSSDKTHTCPPCPAPEAAGG (SEQ ID NO:9). In some embodiments, within the heterodimeric Fc-fused protein, the linker connecting the first subunit of the multisubunit protein to the first antibody Fc domain polypeptide consists of amino acid sequence PKSSDKTHTCPPCPAPEAAGG (SEQ ID NO:239) or EPKSSDKTHTCPPCPAPEAAGG (SEQ ID NO:9).

[0136] In some embodiments, within the heterodimeric Fc-fused protein, the linker connecting the first subunit of the multisubunit protein to the first antibody Fc domain polypeptide comprises amino acid sequence PKSSDKTHTCPPCPAPEAAGG (SEQ ID NO:239). In some embodiments, within the heterodimeric Fc-fused protein, the linker connecting the first subunit of the multisubunit protein to the first antibody Fc domain polypeptide consists of amino acid sequence PKSSDKTHTCPPCPAPEAAGG (SEQ ID NO:239).

[0137] In some embodiments, within the heterodimeric Fc-fused protein, the second, different subunit of the multisubunit protein is fused to the second antibody Fc domain polypeptide by a linker comprising amino acid sequence GGGGSGGGGSGGGGSEPKSSDKTHTCPPCPAPEAAGG (SEQ ID NO:10) or GGGGSGGGGSGGGGSPKSSDKTHTCPPCPAPEAAGG (SEQ ID NO:244). In some embodiments, the second, different subunit of the multisubunit protein is fused to the second antibody Fc domain polypeptide by a linker consisting of amino acid sequence GGGGSGGGGSGGGGSEPKSSDKTHTCPPCPAPEAAGG (SEQ ID NO:10) or GGGGSGGGGSGGGGSPKSSDKTHTCPPCPAPEAAGG (SEQ ID NO:244).

[0138] In some embodiments, within the heterodimeric Fc-fused protein, the second, different subunit of the multisubunit protein is fused to the second antibody Fc domain polypeptide by a linker comprising amino acid sequence GGGGSGGGGSGGGGSEPKSSDKTHTCPPCPAPEAAGG (SEQ ID NO:10). In some embodiments, the second, different subunit of the multisubunit protein is fused to the second antibody Fc domain polypeptide by a linker consisting of amino acid sequence GGGGSGGGGSGGGGSEPKSSDKTHTCPPCPAPEAAGG (SEQ ID NO:10).

[0139] In some embodiments, within the heterodimeric Fc-fused protein, the linker connecting the subunit of the multisubunit protein to the first antibody Fc domain polypeptide comprises amino acid sequence PKSSDKTHTCPPCPAPELLGG (SEQ ID NO:238) or EPKSSDKTHTCPPCPAPELLGG (SEQ ID NO:7). In some embodiments, within the heterodimeric Fc-fused protein, the linker fusing the first subunit of the multisubunit protein to the first antibody Fc domain polypeptide consists of amino acid sequence PKSSDKTHTCPPCPAPELLGG (SEQ ID NO:238) or EPKSSDKTHTCPPCPAPELLGG (SEQ ID NO:7).

[0140] In some embodiments, within the heterodimeric Fc-fused protein, the second, different subunit of the multisubunit protein is fused to the second antibody Fc domain polypeptide by a linker comprising amino acid sequence GGGGSGGGGSGGGGSEPKSSDKTHTCPPCPAPELLGG (SEQ ID NO:8) or GGGGSGGGGSGGGGSPKSSDKTHTCPPCPAPELLGG (SEQ ID NO:241). In some embodiments, the second, different subunit of the multisubunit protein is fused to the second antibody Fc domain polypeptide by a linker consisting of amino acid sequence GGGGSGGGGSGGGGSEPKSSDKTHTCPPCPAPELLGG (SEQ ID NO:8) or GGGGSGGGGSGGGGSPKSSDKTHTCPPCPAPELLGG (SEQ ID NO:241).

[0141] In some embodiments, within the heterodimeric Fc-fused protein, the second, different subunit of the multisubunit protein is fused to the second antibody Fc domain polypeptide by a linker comprising amino acid sequence GGGGSEPKSSDKTHTCPPCPAPELLGG (SEQ ID NO:15) or GGGGSPKSSDKTHTCPPCPAPELLGG (SEQ ID NO:242). In some embodiments, the second, different subunit of the multisubunit protein is fused to the second antibody Fc domain polypeptide by a linker consisting of amino acid sequence GGGGSEPKSSDKTHTCPPCPAPELLGG (SEQ ID NO:15) or GGGGSPKSSDKTHTCPPCPAPELLGG (SEQ ID NO:242).

[0142] In some embodiments, within the heterodimeric Fc-fused protein, the second, different subunit of the multisubunit protein is fused to the second antibody Fc domain polypeptide by a linker comprising amino acid sequence GGGGSGGGGSEPKSSDKTHTCPPCPAPELLGG (SEQ ID NO:16) or GGGGSGGGGSPKSSDKTHTCPPCPAPELLGG (SEQ ID NO:243). In some embodiments, the second, different subunit of the multisubunit protein is fused to the second antibody Fc domain polypeptide by a linker consisting of amino acid sequence GGGGSGGGGSEPKSSDKTHTCPPCPAPELLGG (SEQ ID NO:16) or GGGGSGGGGSPKSSDKTHTCPPCPAPELLGG (SEQ ID NO:243).

[0143] In some embodiments, within the heterodimeric Fc-fused protein, the second, different subunit of the multisubunit protein is fused to the second antibody Fc domain polypeptide by a linker comprising amino acid sequence GGGGSEPKSSDKTHTCPPCPAPEAAGG (SEQ ID NO:65) or GGGGSPKSSDKTHTCPPCPAPEAAGG (SEQ ID NO:245). In some embodiments, the second, different subunit of the multisubunit protein is fused to the second antibody Fc domain polypeptide by a linker consisting of amino acid sequence GGGGSEPKSSDKTHTCPPCPAPEAAGG (SEQ ID NO:65) or GGGGSPKSSDKTHTCPPCPAPEAAGG (SEQ ID NO:245).

[0144] In some embodiments, within the heterodimeric Fc-fused protein, the second, different subunit of the multisubunit protein is fused to the second antibody Fc domain polypeptide by a linker comprising amino acid sequence GGGGSGGGGSEPKSSDKTHTCPPCPAPEAAGG (SEQ ID NO:66) or GGGGSGGGGSPKSSDKTHTCPPCPAPEAAGG (SEQ ID NO:246). In some embodiments, the second, different subunit of the multisubunit protein is fused to the second antibody Fc domain polypeptide by a linker consisting of amino acid sequence GGGGSGGGGSEPKSSDKTHTCPPCPAPEAAGG (SEQ ID NO:66) or GGGGSGGGGSPKSSDKTHTCPPCPAPEAAGG (SEQ ID NO:246).

[0145] In some embodiments, within the heterodimeric Fc-fused protein, the linker connecting the first subunit of the multisubunit protein to the first antibody Fc domain polypeptide comprises amino acid sequence EPKSSDKTHTCPPCPAPEAEGA (SEQ ID NO:11) or PKSSDKTHTCPPCPAPEAEGA (SEQ ID NO:240). In some embodiments, within the heterodimeric Fc-fused protein, the linker fusing the first subunit of the multisubunit protein to the first antibody Fc domain polypeptide consists of amino acid sequence EPKSSDKTHTCPPCPAPEAEGA (SEQ ID NO:11) or PKSSDKTHTCPPCPAPEAEGA (SEQ ID NO:240).

[0146] In some embodiments, within the heterodimeric Fc-fused protein, the second, different subunit of the multisubunit protein is fused to the second antibody Fc domain polypeptide by a linker comprising amino acid sequence GGGGSGGGGSGGGGSEPKSSDKTHTCPPCPAPEAEGA (SEQ ID NO:12) or GGGGSGGGGSGGGGSPKSSDKTHTCPPCPAPEAEGA (SEQ ID NO:247). In some embodiments, the second, different subunit of the multisubunit protein is fused to the second antibody Fc domain polypeptide by a linker consisting of amino acid sequence GGGGSGGGGSGGGGSEPKSSDKTHTCPPCPAPEAEGA (SEQ ID NO:12) or GGGGSGGGGSGGGGSPKSSDKTHTCPPCPAPEAEGA (SEQ ID NO:247).

[0147] In some embodiments, within the heterodimeric Fc-fused protein, the second, different subunit of the multisubunit protein is fused to the second antibody Fc domain polypeptide by a linker comprising amino acid sequence GGGGSEPKSSDKTHTCPPCPAPEAEGA (SEQ ID NO:67) or GGGGSPKSSDKTHTCPPCPAPEAEGA (SEQ ID NO:248). In some embodiments, the second, different subunit of the multisubunit protein is fused to the second antibody Fc domain polypeptide by a linker consisting of amino acid sequence GGGGSEPKSSDKTHTCPPCPAPEAEGA (SEQ ID NO:67) or GGGGSPKSSDKTHTCPPCPAPEAEGA (SEQ ID NO:248).

[0148] In some embodiments, within the heterodimeric Fc-fused protein, the second, different subunit of the multisubunit protein is fused to the second antibody Fc domain polypeptide by a linker comprising amino acid sequence GGGGSGGGGSEPKSSDKTHTCPPCPAPEAEGA (SEQ ID NO:68) or GGGGSGGGGSPKSSDKTHTCPPCPAPEAEGA (SEQ ID NO:249). In some embodiments, the second, different subunit of the multisubunit protein is fused to the second antibody Fc domain polypeptide by a linker consisting of amino acid sequence GGGGSGGGGSEPKSSDKTHTCPPCPAPEAEGA (SEQ ID NO:68) or GGGGSGGGGSPKSSDKTHTCPPCPAPEAEGA (SEQ ID NO:249).

[0149] In certain embodiments the Fc domain polypeptide is that of an IgG1 Fc. In some embodiments, a protein of the current invention includes, a first antibody Fc domain polypeptide and a second antibody Fc domain polypeptide, which are both mutated IgG1 Fc domain polypeptides that promote heterodimerization with each other. For example, if the Fc domain is derived from the Fc of a human IgG1, the Fc domain can comprise an amino acid sequence at least 90% identical to amino acids 234-332 of a human IgG1 antibody, and differ at one or more position(s) selected from the group consisting of Q347, Y349, L351, 5354, E356, E357, K360, Q362, 5364, T366, L368, K370, N390, K392, T394, D399, 5400, D401, F405, Y407, K409, T411, and K439.

[0150] In some embodiments, the antibody constant domain can comprise an amino acid sequence at least 90% identical to amino acids 234-332 of a human IgG1 antibody, and differ by one or more substitution(s) selected from the group consisting of Q347E, Q347R, Y349S, Y349K, Y349T, Y349D, Y349E, Y349C, L351K, L351D, L351Y, S354C, E356K, E357Q, E357L, E357W, K360E, K360W, Q362E, S364K, S364E, S364H, S364D, T366V, T366I, T366L, T366M, T366K, T366W, T366S, L368E, L368A, L368D, K370S, N390D, N390E, K392L, K392M, K392V, K392F, K392D, K392E, T394F, D399R, D399K, D399V, S400K, S400R, D401K, F405A, F405T, Y407A, Y407I, Y407V, K409F, K409W, K409D, T411D, T411E, K439D, and K439E. All the amino acid positions in an Fc domain or hinge region disclosed herein are numbered according to EU numbering.

[0151] In some embodiments, the first antibody IgG1 Fc domain polypeptide includes one or more mutation(s) selected from K360E and K409W, and the second antibody IgG1 Fc domain polypeptide includes one or more mutation(s) selected from Q347R, D399V, and F405T. In some embodiments, the first antibody IgG1 Fc domain polypeptide includes one or more mutation(s) selected from Q347R, D399V, and F405T, and the second antibody IgG1 Fc domain polypeptide includes one or more mutation(s) selected from K360E and K409W. In some embodiments, the first antibody IgG1 Fc domain polypeptide includes mutations K360E and K409W, and the second antibody IgG1 Fc domain polypeptide includes mutations Q347R, D399V, and F405T. In some embodiments, the first antibody IgG1 Fc domain polypeptide includes mutations Q347R, D399V, and F405T, and the second antibody IgG1 Fc domain polypeptide includes mutations K360E and K409W.

[0152] In some embodiments, a heterodimeric Fc-fused protein of the present invention with an IgG1 Fc includes one or more mutation(s) to reduce binding to an FcγR (e.g., FcγRI, FcγRIIA, FcγRIIB, FcγRIIIA, or FcγRIIIB) or a complement component (e.g., C1q) in the first and/or second polypeptides. Such mutations are useful for reducing effector functions. For example, a protein of the present disclosure includes LALA (L234A and L235A) mutations, LALAPA (L234A, L235A, and P329A) mutations, LALAPG (L234A, L235A, and P329G) mutations, or LALEGAASPS (L234A, L235E, G237A, A330S, and P331S) mutations.

[0153] In some embodiments, a heterodimeric Fc-fused protein according to the invention includes a first antibody IgG4 or IgG1 Fc domain polypeptide and the second antibody IgG4 or IgG1 Fc domain polypeptide each containing the mutation P329G or P329A. In specific embodiments, a heterodimeric Fc-fused protein according to the invention comprises a first antibody IgG4 or IgG1 Fc domain polypeptide and a second antibody IgG4 or IgG1 Fc domain polypeptide each comprising the mutation P329A.

[0154] In some embodiments, the first IgG1 antibody Fc domain polypeptide and the second, different IgG1 antibody Fc domain polypeptide each contain a mutation selected from A330S and P331S. In some embodiments, the first IgG1 antibody Fc domain polypeptide and the second, different IgG1 antibody Fc domain polypeptide each contain the mutations A330S and P331S.

[0155] In certain embodiments, an additional disulfide bond between IgG1 Fc monomers is introduced, which improves the stability of the heterodimer. In an exemplary embodiment, the first antibody Fc domain polypeptide fused to the first subunit of a multisubunit protein includes a Y349C substitution in the CH3 domain, which forms a disulfide bond with an S354C substitution on the second antibody Fc domain polypeptide fused to the second, different subunit of a multisubunit protein. Alternatively, the first antibody Fc domain polypeptide fused to the first subunit of a multisubunit protein includes an S354C substitution in the CH3 domain, which forms a disulfide bond with a Y349C substitution on the second antibody Fc domain polypeptide fused to the second, different subunit of a multisubunit protein.

[0156] Any of the IgG1 antibody Fc domain polypeptides provided in Table 2 below can be employed in combination with any of the IgG1 hinge sequences (which, in the current invention, is part or the entirety of a linker connecting the protein sequence of the first subunit of the multisubunit protein to the first IgG1 antibody Fc domain polypeptide, or a linker connecting the additional subunit to the second, different IgG1 antibody Fc domain polypeptide) provided in Table 1 below. Exemplary IgG1 hinge-Fc domain polypeptides are provided in Table 3 below. In certain embodiments, the first and second polypeptides of the Fc-fused protein comprise the amino acid sequences of SEQ ID NOs: 212 and 212; 213 and 214; 215 and 216; 217 and 218; 214 and 213; 216 and 215; or 218 and 217, respectively. In certain embodiments, the first and second polypeptides of the Fc-fused protein comprise the amino acid sequences of SEQ ID NOs:228 and 228; 229 and 230; 231 and 232; 233 and 234; 235 and 236; 230 and 229; 232 and 231; 234 and 233; 236 and 235; 228 and 250; 250 and 228; 250 and 250; 229 and 252; 252 and 229; 251 and 230; 230 and 251; 253 and 232; 232 and 253; 231 and 254; 254 and 231; 255 and 234; 234 and 255; 233 and 256; 256 and 233; 257 and 236; 236 and 257; 258 and 235; or 235 and 258, respectively.

### IgG4 Fc-Fused Proteins

[0157] In one aspect, the current invention provides an improvement on a multisubunit protein. In one aspect the present invention provides a heterodimeric IgG4 Fc-fused protein comprising: a first polypeptide comprising a first antibody IgG4 Fc domain polypeptide and a second polypeptide comprising a second, different antibody IgG4 Fc domain polypeptide bound to the first antibody Fc domain polypeptide, in which the first polypeptide further comprises a first subunit of a multisubunit protein fused by a linker comprising amino acid sequence RVESKYGPPCPPCPAPEFXGG (SEQ ID NO:1) to the first antibody IgG4 Fc domain polypeptide, in which X represents L or E; a second, different subunit of the multisubunit protein is fused to the second antibody IgG4 Fc domain polypeptide and the subunits of the multisubunit protein are bound to each other; the first antibody Fc domain polypeptide and the second antibody IgG4 Fc domain polypeptide each contain different mutations promoting heterodimerization.

[0158] In some embodiments, within the heterodimeric IgG4 Fc-fused protein, the linker connecting the a first subunit of a multisubunit protein to the first antibody Fc domain polypeptide consists of amino acid sequence RVESKYGPPCPPCPAPEFXGG, wherein X represents L or E (SEQ ID NO:1).

[0159] In certain embodiments, the linker connecting the protein sequence of a first subunit of a multisubunit protein to the first antibody Fc domain polypeptide further comprises a spacer peptide. In certain embodiments, the linker comprises a sequence of SEQ ID NO:1 and a spacer peptide.

[0160] In certain embodiments, the second, different subunit of the multisubunit protein is fused to the second antibody Fc domain polypeptide by a linker that comprises a sequence RVESKYGPPCPPCPAPEFXGG, wherein X represents L or E (SEQ ID NO:1), and a spacer peptide. In certain embodiments, the second, different subunit of the multisubunit protein is fused to the second antibody Fc domain polypeptide by a linker that consists of the amino acid sequence RVESKYGPPCPPCPAPEFXGG, wherein X represents L or E (SEQ ID NO:1). In certain embodiments, the amino acid sequence of the linker connecting the second, different subunit of the multisubunit protein to the second antibody Fc domain polypeptide is identical to the amino acid sequence of the linker connecting the subunit of the multisubunit protein to the first antibody Fc domain polypeptide.

[0161] Any spacer peptide described under the heading “Spacer peptides” can be employed. For example, in certain embodiments, the spacer peptide comprises an amino acid sequence set forth in any one of SEQ ID NOs: 107-120. In certain embodiments, the spacer peptide consists of an amino acid sequence set forth in any one of SEQ ID NOs: 107-120. In certain embodiments, the linker connecting the subunit of the multisubunit protein to the first antibody Fc domain polypeptide consists of, or consists essentially of, a spacer peptide disclosed herein and SEQ ID NO:1. In certain embodiments, the linker consists of, or consists essentially of, a spacer peptide disclosed herein and SEQ ID NO:1. In certain embodiments, the spacer peptide is N-terminal to the first linker and/or the second linker.

[0162] In some embodiments, within the heterodimeric Fc-fused protein, the linker connecting the subunit of the multisubunit protein to the first antibody Fc domain polypeptide comprises amino acid sequence RVESKYGPPCPPCPAPEFLGG (SEQ ID NO:2). In some embodiments, the linker fusing the first subunit of the multisubunit protein to the first antibody Fc domain polypeptide consists of amino acid sequence RVESKYGPPCPPCPAPEFLGG (SEQ ID NO:2).

[0163] In some embodiments, the second, different subunit of the multisubunit protein is fused to the second antibody Fc domain polypeptide by a linker comprising amino acid sequence GGGGSGGGGSGGGGSRVESKYGPPCPPCPAPEFLGG (SEQ ID NO:3). In some embodiments, the second, different subunit of the multisubunit protein is fused to the second antibody Fc domain polypeptide by a linker consisting of amino acid sequence GGGGSGGGGSGGGGSRVESKYGPPCPPCPAPEFLGG (SEQ ID NO:3).

[0164] In some embodiments, the second, different subunit of the multisubunit protein is fused to the second antibody Fc domain polypeptide by a linker comprising amino acid sequence GGGGSRVESKYGPPCPPCPAPEFLGG (SEQ ID NO:13). In some embodiments, the second, different subunit of the multisubunit protein is fused to the second antibody Fc domain polypeptide by a linker consisting of amino acid sequence GGGGSRVESKYGPPCPPCPAPEFLGG (SEQ ID NO:13).

[0165] In some embodiments, the second, different subunit of the multisubunit protein is fused to the second antibody Fc domain polypeptide by a linker comprising amino acid sequence GGGGSGGGGSRVESKYGPPCPPCPAPEFLGG (SEQ ID NO:14). In some embodiments, the second, different subunit of the multisubunit protein is fused to the second antibody Fc domain polypeptide by a linker consisting of amino acid sequence GGGGSGGGGSRVESKYGPPCPPCPAPEFLGG (SEQ ID NO:14).

[0166] In some embodiments, within the heterodimeric Fc-fused protein, the linker connecting the first subunit of the multisubunit protein to the first antibody Fc domain polypeptide comprises amino acid sequence RVESKYGPPCPPCPAPEFEGG (SEQ ID NO:4). In some embodiments, the linker fusing the first subunit of the multisubunit protein to the first antibody Fc domain polypeptide consists of amino acid sequence RVESKYGPPCPPCPAPEFEGG (SEQ ID NO:4).

[0167] In some embodiments, the second, different subunit of the multisubunit protein is fused to the second antibody Fc domain polypeptide by a linker comprising amino acid sequence GGGGSGGGGSGGGGSRVESKYGPPCPPCPAPEFEGG (SEQ ID NO:5). In some embodiments, the second, different subunit of the multisubunit protein is fused to the second antibody Fc domain polypeptide by a linker consisting of amino acid sequence GGGGSGGGGSGGGGSRVESKYGPPCPPCPAPEFEGG (SEQ ID NO:5).

[0168] In some embodiments, the second, different subunit of the multisubunit protein is fused to the second antibody Fc domain polypeptide by a linker comprising amino acid sequence GGGGSRVESKYGPPCPPCPAPEFEGG (SEQ ID NO:63). In some embodiments, the second, different subunit of the multisubunit protein is fused to the second antibody Fc domain polypeptide by a linker consisting of amino acid sequence GGGGSRVESKYGPPCPPCPAPEFEGG (SEQ ID NO:63).

[0169] In some embodiments, the second, different subunit of the multisubunit protein is fused to the second antibody Fc domain polypeptide by a linker comprising amino acid sequence GGGGSGGGGSRVESKYGPPCPPCPAPEFEGG (SEQ ID NO:64). In some embodiments, the second, different subunit of the multisubunit protein is fused to the second antibody Fc domain polypeptide by a linker consisting of amino acid sequence GGGGSGGGGSRVESKYGPPCPPCPAPEFEGG (SEQ ID NO:64).

[0170] In certain embodiments the Fc domain polypeptide is that of an IgG4 Fc. IgG4 is an unstable dimer that can undergo a Fab-arm exchange and pair with other IgG4 antibodies in the body. In certain embodiments, a S228P mutation is introduced within the hinge (which, in the current invention, is part or the entirety of a linker connecting the first subunit of the multisubunit protein to the first IgG4 antibody Fc domain polypeptide, or a linker connecting the additional subunit to the second, different IgG4 antibody Fc domain polypeptide), which increases the stability of the hinge region and reduces the chance for Fab-arm exchange. In certain embodiments, an additional disulfide bond between Fc domain polypeptide monomers is introduced, which improves the stability of the heterodimer. In an exemplary embodiment, the first antibody Fc domain polypeptide linked to the first subunit of the multisubunit protein includes a Y349C substitution in the CH3 domain, which forms a disulfide bond with an S354C substitution on the second antibody Fc domain polypeptide linked to the second, different subunit of the multisubunit proteinsecond antibody Fc domain polypeptide. Alternatively, the first antibody Fc domain polypeptide linked to the first subunit of the multisubunit protein includes an S354C substitution in the CH3 domain, which forms a disulfide bond with a Y349C substitution on the second antibody Fc domain polypeptide linked to the second, different subunit of the multisubunit protein.

[0171] In some embodiments, a protein of the current invention includes, a first antibody Fc domain polypeptide and a second antibody Fc domain polypeptide, which are both mutated IgG4 Fc domain polypeptides that promote heterodimerization with each other.

[0172] In some embodiments, the first antibody IgG4 Fc domain polypeptide includes one or more mutation(s) selected from K360E, K370E, and R409W, and the second antibody IgG4 Fc domain polypeptide includes one or more mutation(s) selected from E357N, Q347R, D399V, and F405T. In some embodiments, the first antibody IgG4 Fc domain polypeptide includes mutations K370E and R409W, and the second antibody IgG4 Fc domain polypeptide includes mutations E357N, D399V, and F405T. In some embodiments, the first antibody IgG4 Fc domain polypeptide includes mutations E357N, D399V, and F405T, and the second antibody IgG4 Fc domain polypeptide includes mutations K370E and R409W. In some embodiments, the first antibody IgG4 Fc domain polypeptide includes mutations K360E and R409W, and the second antibody IgG4 Fc domain polypeptide includes mutations Q347R, D399V, and F405T. In some embodiments, the first antibody IgG4 Fc domain polypeptide includes mutations Q347R, D399V, and F405T, and the second antibody IgG4 Fc domain polypeptide includes mutations K360E and R409W.

[0173] In some embodiments, a heterodimeric Fc-fused protein of the present invention with an IgG4 Fc includes one or more mutation(s) to reduce binding to an FcγR (e.g., FcγRI, FcγRIIA, FcγRIIB, FcγRIIIA, or FcγRIIIB) or a complement component (e.g., C1q) in the first and/or second polypeptide(s). Such mutations are useful for reducing effector functions. For example, a protein of the present disclosure includes SPLE (S228P and L235E) mutations, SPLEPA (S228P, L235E, and P329A) mutations, or SPLEPG (S228P, L235E, and P329G) mutations.

[0174] Any of the IgG4 antibody Fc domain polypeptides provided in Table 2 can be employed in combination with any of the IgG4 hinge sequences (which, in the current invention, is part or the entirety of a linker connecting the first subunit of the multisubunit protein to the first IgG4 antibody Fc domain polypeptide, or a linker connecting the second, different subunit of the multisubunit protein to the second, different IgG4 antibody Fc domain polypeptide) provided in Table 1. Exemplary IgG4 hinge-Fc domain polypeptides are provided in Table 3. In certain embodiments, the first and second polypeptides of the Fc-fused protein comprise the amino acid sequences of SEQ ID NOs:205 and 205; 206 and 207; 208 and 209; 210 and 211; 207 and 206; 209 and 208; or 211 and 210, respectively. In certain embodiments, the first and second polypeptides of the Fc-fused protein comprise the amino acid sequences of SEQ ID NOs:219 and 219; 220 and 221; 222 and 223; 224 and 225; 226 and 227; 221 and 220; 223 and 222; 225 and 224; or 227 and 226, respectively.

### Disulfide Bonds

[0175] Some heterodimeric Fc-fused proteins of the present invention include the native heterodimer disulfide bond between the first subunit of a multisubunit protein and the second, different subunit of the multisubunit protein. For example, in an exemplary embodiment, a heterodimeric Fc-fused protein according to the invention includes a native heterodimer disulfide bond between p35 and p40 subunits of IL-12. Such a protein includes the native disulfide bond between C74 of p35 and C177 of p40.

[0176] Some heterodimeric Fc-fused proteins of the present invention include an artificial or engineered heterodimer disulfide bond between the first subunit of a multisubunit protein and the second, different subunit of the multisubunit protein. For example, in an exemplary embodiment, a heterodimeric Fc-fused protein according to the invention includes an artificial or engineered heterodimer disulfide bond between p35 and p40 subunits of IL-12. Such a protein includes an artificial or engineered disulfide bond between V185C of p35 and Y292C of p40.

[0177] Some heterodimeric Fc-fused proteins of the present invention include the native heterodimer disulfide bond between the first subunit of a multisubunit protein and the second, different subunit of the multisubunit protein, and an artificial or engineered heterodimer disulfide bond between the first subunit of a multisubunit protein and the second, different subunit of the multisubunit protein. For example, in an exemplary embodiment, a native heterodimer disulfide bond between p35 and p40 subunits of IL-12, and includes an artificial or engineered heterodimer disulfide bond between p35 and p40 subunits of IL-12. Such a protein includes the native disulfide bond between C74 of p35 and C177 of p40, and an artificial or engineered disulfide bond between V185C of p35 and Y292C of p40.

[0178] Some heterodimeric Fc-fused proteins of the present invention are engineered to remove the native disulfide bond, and to replace it with a non-native artificial or engineered disulfide bond. For example, in an exemplary embodiment, a heterodimeric Fc-fused protein according to the invention includes p35 of IL-12 in which the native C74 is mutated to serine, and a p40 of IL-12 in which the native C177 is mutated to serine, thereby removing the native disulfide bond between p35 and p40 subunits of IL-12. To this mutated IL-12, two new mutations are introduced, V185C on p35 and Y292C on p40, thereby introducing a non-native artificial or engineered disulfide bond.

### Sequences of Components of Fc Fused Polypeptides

[0179] Exemplary heterodimeric Fc-fused proteins of the present invention are constructed with any one of the IgG1 or IgG4 Fc variant sequences and any one of the corresponding linker sequences described in the Tables 1-2 below. The fusion protein constructs of the present invention can confer a higher serum half-life compared to a native/natural multisubunit protein, improve yield of the proteins during production, enhance stability during storage, and/or improve efficacy when used as a therapeutic.

[0180] Tables 4 and 5 list amino acid sequences of exemplary protein constructs of the present invention. All mutations/substitutions in the Fc domain polypeptides are numbered according to the EU numbering system. Mutations in p35 and p40 subunits are numbered starting from the respective N-terminal amino acids of these subunits.

[0181] Any of the IgG4 antibody Fc variant domain polypeptides provided in Table 2 below can be employed in combination with any of the IgG4 hinge sequences provided in Table 1 below. Similarly, any of the IgG1 antibody Fc variant domain polypeptides provided in Table 2 below can be employed in combination with any of the IgG1 hinge sequences provided in Table 1 below. Exemplary IgG1 hinge-Fc domain polypeptides are provided in Table 3 below.

TABLE 1
Linker Variants

| Hinge | Amino Acid Sequence |
|---|---|
| IgG4 hinge | RVESKYGPPCPPCPAPEFXGG |
| consensus | wherein X is L or E |
| | (SEQ ID NO: 1) |
| IgG4 hinge | RVESKYGPPCPPCPAPEFLGG |
| S228P | (SEQ ID NO: 2) |
| IgG4 hinge | RVESKYGPPCPPCPAPEFEGG |
| S228P/ | (SEQ ID NO: 4) |
| L235E | |
| IgG1 hinge | EPKSSDKTHTCPPCPAPEX₁X₂GX₃ |
| consensus | wherein X₁ is L or A; |
| | X₂ is L, E, or A; |
| | and X₃ is A or G |
| | (SEQ ID NO: 6) |
| IgG1 hinge | EPKSSDKTHTCPPCPAPELLGG |
| C220S | (SEQ ID NO: 7) |
| Hinge | Amino Acid Sequence |
| IgG1 hinge | EPKSSDKTHTCPPCPAPEAAGG |
| C220S/L234A/ | (SEQ ID NO: 9) |
| L235A | |
| IgG1 hinge | EPKSSDKTHTCPPCPAPEAEGA |
| C220S/L234A/ | (SEQ ID NO: 11) |
| L235E/ | |
| G237A | |
| IgG1 hinge | PKSSDKTHTCPPCPAPEX₁X₂GX₃ |
| ΔE216 | wherein X₁ is L or A; |
| | X₂ is L, E, or A; and |
| | X₃ is A or G |
| | (SEQ ID NO: 237) |
| IgG1 hinge | PKSSDKTHTCPPCPAPELLGG |
| ΔE216/C220S | (SEQ ID NO: 238) |
| IgG1 hinge | PKSSDKTHTCPPCPAPEAAGG |
| ΔE216/C220S/ | (SEQ ID NO: 239) |
| L234A/L235A | |
| IgG1 hinge | PKSSDKTHTCPPCPAPEAEGA |
| ΔE216/C220S/ | (SEQ ID NO: 240) |
| L234A/L235E/ | |
| G237A | |

TABLE 2
IgG4 Fc and IgG1 Fc Wild-type Sequences;
and Exemplary IgG4 Antibody Fc Variant
and IgG1 Antibody Fc Variant Sequences
(amino acid substitutions are
indicated in bold)

| Fc domain | Amino Acid Sequence* |
|---|---|
| IgG4 Fc | PSVFLFPPKPKDTLMISRTP |
| wild-type | EVTCVVVDVSQEDPEVQFNW |
| | YVDGVEVHNAKTKPREEQFN |
| | STYRVVSVLTVLHQDWLNGK |
| | EYKCKVSNKGLPSSIEKTIS |
| | KAKGQPREPQVYTLPPSQEE |
| | MTKNQVSLTCVKGFYPSDIA |
| | VEWESNGQPENNYKTTPPVL |
| | DSDGSFFLYSKLTVDKSRWQ |
| | EGNVFSCSVMHEALHNHYTQ |
| | KSLSLSLG |
| | (SEQ ID NO: 205) |
| IgG4 Fc Y349C/ | PSVFLFPPKPKDTLMISRTP |
| K370E/R409W | EVTCVVVDVSQEDPEVQFNW |
| | YVDGVEVHNAKTKPREEQFN |
| | STYRVVSVLTVLHQDWLNGK |
| | EYKCKVSNKGLPSSIEKTIS |
| | KAKGQPREPQVCTLPPSQEE |
| | MTKNQVSLTCVEGFYPSDIA |
| | VEWESNGQPENNYKTTPPVL |
| | DSDGSFFLYSWLTVDKSRWQ |
| | EGNVFSCSVMHEALHNHYTQ |
| | KSLSLSLG |
| | (SEQ ID NO: 206) |
| IgG4 Fc S354C/ | PSVFLFPPKPKDTLMISRTP |
| E357N/D399V/ | EVTCVVVDVSQEDPEVQFNW |
| F405T | YVDGVEVHNAKTKPREEQFN |
| | STYRVVSVLTVLHQDWLNGK |
| | EYKCKVSNKGLPSSIEKTIS |
| | KAKGQPREPQVYTLPPCQEN |
| | MTKNQVSLTCLVKGFYPSDI |
| | AVEWESNGQPENNYKTTPPV |
| | LVSDGSFTLYSRLTVDKSRW |
| | QEGNVFSCSVMHEALHNHYT |
| | QKSLSLSLG |
| | (SEQ ID NO: 207) |
| IgG4 Fc Y349C/ | PSVFLFPPKPKDTLMISRTP |
| K360E/ R409W | EVTCVVVDVSQEDPEVQFNW |
| | YVDGVEVHNAKTKPREEQFN |
| | STYRVVSVLTVLHQDWLNGK |
| | EYKCKVSNKGLPSSIEKTIS |
| | KAKGQPREPQVCTLPPSQEE |
| | MTENQVSLTCLVKGFYPSDI |
| | AVEWESNGQPENNYKTTPPV |
| | LDSDGSFFLYSWLTVDKSRW |
| | QEGNVFSCSVMHEALHNHYT |
| | QKSLSLSLG |
| | (SEQ ID NO: 208) |
| IgG4 Fc Q347R/ | PSVFLFPPKPKDTLMISRTP |
| S354C/ D399V/ | EVTCVVVDVSQEDPEVQFNW |
| F405T | YVDGVEVHNAKTKPREEQFN |
| | STYRVVSVLTVLHQDWLNGK |
| | EYKCKVSNKGLPSSIEKTIS |
| | KAKGQPREPRVYTLPPCQEE |
| | MTKNQVSLTCLVKGFYPSDI |
| | AVEWESNGQPENNYKTTPPV |
| | LVSDGSFTLYSRLTVDKSRW |
| | QEGNVFSCSVMHEALHNHYT |
| | QKSLSLSLG |
| | (SEQ ID NO: 209) |
| IgG4 Fc P329A/ | PSVFLFPPKPKDTLMISRTP |
| Y349C/ K360E/ | EVTCVVVDVSQEDPEVQFNW |
| R409W | YVDGVEVHNAKTKPREEQFN |
| | STYRVVSVLTVLHQDWLNGK |
| | EYKCKVSNKGLASSIEKTIS |
| | KAKGQPREPQVCTLPPSQEE |
| | MTENQVSLTCLVKGFYPSDI |
| | AVEWESNGQPENNYKTTPPV |
| | LDSDGSFFLYSWLTVDKSRW |
| | QEGNVFSCSVMHEALHNHYT |
| | QKSLSLSLG |
| | (SEQ ID NO: 210) |
| IgG4 Fc P329A/ | PSVFLFPPKPKDTLMISRTP |
| S354C/Q347R/ | EVTCVVVDVSQEDPEVQFNW |
| D399V/F405T | YVDGVEVHNAKTKPREEQFN |
| | STYRVVSVLTVLHQDWLNGK |
| | EYKCKVSNKGLASSIEKTIS |
| | KAKGQPREPRVYTLPPCQEE |
| | MTKNQVSLTCLVKGFYPSDI |
| | AVEWESNGQPENNYKTTPPV |
| | LVSDGSFTLYSRLTVDKSRW |
| | QEGNVFSCSVMHEALHNHYT |
| | QKSLSLSLG |
| | (SEQ ID NO: 211) |
| IgG1 Fc | PSVFLFPPKPKDTLMISRTP |
| wild-type | EVTCVVVDVSHEDPEVKFNW |
| | YVDGVEVHNAKTKPREEQYN |
| | STYRVVSVLTVLHQDWLNGK |
| | EYKCKVSNKALPAPIEKTIS |
| | KAKGQPREPQVYTLPPSRDE |
| | LTKNQVSLTCLVKGFYPSDI |
| | AVEWESNGQPENNYKTTPPV |
| | LDSDGSFFLYSKLTVDKSRW |
| | QQGNVFSCSVMHEALFTNHY |
| | TQKSLSLSPG |
| | (SEQ ID NO: 212) |
| IgG1 Fc Y349C/ | PSVFLFPPKPKDTLMISRTP |
| K360E/K409W | EVTCVVVDVSHEDPEVKFNW |
| | YVDGVEVHNAKTKPREEQYN |
| | STYRVVSVLTVLHQDWLNGK |
| | EYKCKVSNKALPAPIEKTIS |
| | KAKGQPREPQVCTLPPSRDE |
| | LTENQVSLTCLVKGFYPSDI |
| | AVEWESNGQPENNYKTTPPV |
| | LDSDGSFFLYSWLTVDKSRW |
| | QQGNVFSCSVMHEALHNHYT |
| | QKSLSLSPG |
| | (SEQ ID NO: 213) |
| IgG1 Fc Q347R/ | PSVFLFPPKPKDTLMISRTP |
| S354C/D399V/ | EVTCVVVDVSHEDPEVKFNW |
| F405T | YVDGVEVHNAKTKPREEQYN |
| | STYRVVSVLTVLHQDWLNGK |
| | EYKCKVSNKALPAPIEKTIS |
| | KAKGQPREPRVYTLPPCRDE |
| | LTKNQVSLTCLVKGFYPSDI |
| | AVEWESNGQPENNYKTTPPV |
| | LVSDGSFTLYSKLTVDKSRW |
| | QQGNVFSCSVMHEALHNHYT |
| | QKSLSLSPG |
| | (SEQ ID NO: 214) |
| IgG1 Fc P329A/ | PSVFLFPPKPKDTLMISRTP |
| Y349C/ K360E/ | EVTCVVVDVSHEDPEVKFNW |
| K409W | YVDGVEVHNAKTKPREEQYN |
| | STYRVVSVLTVLHQDWLNGK |
| | EYKCKVSNKALAAPIEKTIS |
| | KAKGQPREPQVCTLPPSRDE |
| | LTENQVSLTCLVKGFYPSDI |
| | AVEWESNGQPENNYKTTPPV |
| | LDSDGSFFLYSWLTVDKSRW |
| | QQGNVFSCSVMHEALHNHYT |
| | QKSLSLSPG |
| | (SEQ ID NO: 215) |
| IgG1 Fc P329A/ | PSVFLFPPKPKDTLMISRTP |
| Q347R S354C/ | EVTCVVVDVSHEDPEVKFNW |
| D399V/ F405T | YVDGVEVHNAKTKPREEQYN |
| | STYRVVSVLTVLHQDWLNGK |
| | EYKCKVSNKALAAPIEKTIS |
| | KAKGQPREPRVYTLPPCRDE |
| | LTKNQVSLTCLVKGFYPSDI |
| | AVEWESNGQPENNYKTTPPV |
| | LVSDGSFTLYSKLTVDKSRW |
| | QQGNVFSCSVMHEALHNHYT |
| | QKSLSLSPG |
| | (SEQ ID NO: 216) |
| IgG1 Fc A330S/ | PSVFLFPPKPKDTLMISRTP |
| P331S/Y349C/ | EVTCVVVDVSHEDPEVKFNW |
| K360E/ K409W | YVDGVEVHNAKTKPREEQYN |
| | STYRVVSVLTVLHQDWLNGK |
| | EYKCKVSNKALPSSIEKTIS |
| | KAKGQPREPQVCTLPPSRDE |
| | LTENQVSLTCLVKGFYPSDI |
| | AVEWESNGQPENNYKTTPPV |
| | LDSDGSFFLYSWLTVDKSRW |
| | QQGNVFSCSVMHEALHNHYT |
| | QKSLSLSPG |
| | (SEQ ID NO: 217) |
| IgG1 Fc A330S/ | PSVFLFPPKPKDTLMISRTP |
| P331S/Q347R/ | EVTCVVVDVSHEDPEVKFNW |
| S354C/ D399V/ | YVDGVEVHNAKTKPREEQYN |
| F405T | STYRVVSVLTVLHQDWLNGK |
| | EYKCKVSNKALPSSIEKTIS |
| | KAKGQPREPRVYTLPPCRDE |
| | LTKNQVSLTCLVKGFYPSDI |
| | AVEWESNGQPENNYKTTPPV |
| | LVSDGSFTLYSKLTVDKSRW |
| | QQGNVFSCSVMHEALHNHYT |
| | QKSLSLSPG |
| | (SEQ ID NO: 218) |

*The amino acid sequences can further comprise a lysine (K) at the C-terminus.

TABLE 3
S228P mutated IgG4 Hinge-Fc (wild-type);
Exemplary S228P mutated IgG4 Hinge-Fc
Variants or Hinge Portion-Fc Variants:
C220S mutated IgG1 Hinge-Fc (wild-
type); Exemplary C220S mutated IgG1
Hinge-Fc Variants or Hinge Portion-Fc
Variants

| Linker-Fc | Amino Acid Sequence* |
|---|---|
| IgG4 hinge-Fc | RVESKYGPPCPPCPA |
| S228P | PEFLGGPSVFLFPPK |
| | PKDTLMISRTPEVTC |
| | VVVDVSQEDPEVQFN |
| | WYVDGVEVHNAKTKP |
| | REEQFNSTYRVVSVL |
| | TVLHQDWLNGKEYKC |
| | KVSNKGLPSSIEKTI |
| | SKAKGQPREPQVYTL |
| | PPSQEEMTKNQVSLT |
| | CLVKGFYPSDIAVEW |
| | ESNGQPENNYKTTPP |
| | VLDSDGSFFLYSKLT |
| | VDKSRWQEGNVFSCS |
| | VMHEALHNHYTQKSL |
| | SLSLG |
| | (SEQ ID NO: 219) |
| IgG4 hinge-Fc | RVESKYGPPCPPCPA |
| S228P/Y349C/ | PEFLGGPSVFLFPPK |
| K370E/R409W | PKDTLMISRTPEVTC |
| | VVVDVSQEDPEVQFN |
| | WYVDGVEVHNAKTKP |
| | REEQFNSTYRVVSVL |
| | TVLHQDWLNGKEYKC |
| | KVSNKGLPSSIEKTI |
| | SKAKGQPREPQVCTL |
| | PPSQEEMTKNQVSLT |
| | CLVEGFYPSDIAVEW |
| | ESNGQPENNYKTTPP |
| | VLDSDGSFFLYSWLT |
| | VDKSRWQEGNVFSCS |
| | VMHEALHNHYTQKSL |
| | SLSLG |
| | (SEQ ID NO: 220) |
| IgG4 hinge-Fc | RVESKYGPPCPPCPA |
| S228P/S354C/ | PEFLGGPSVFLFPPK |
| E357N/D399V/ | PKDTLMISRTPEVTC |
| F405T | VVVDVSQEDPEVQFN |
| | WYVDGVEVHNAKTKP |
| | REEQFNSTYRVVSVL |
| | TVLHQDWLNGKEYKC |
| | KVSNKGLPSSIEKTI |
| | SKAKGQPREPQVYTL |
| | PPCQENMTKNQVSLT |
| | CLVKGFYPSDIAVEW |
| | ESNGQPENNYKTTPP |
| | VLVSDGSFTLYSRLT |
| | VDKSRWQEGNVFSCS |
| | VMHEALHNHYTQKSL |
| | SLSLG |
| | (SEQ ID NO: 221) |
| IgG4 hinge-Fc | RVESKYGPPCPPCPA |
| S228P/Y349C/ | PEFLGGPSVFLFPPK |
| K360E/R409W | PKDTLMISRTPEVTC |
| | VVVDVSQEDPEVQFN |
| | WYVDGVEVHNAKTKP |
| | REEQFNSTYRVVSVL |
| | TVLHQDWLNGKEYKC |
| | KVSNKGLPSSIEKTI |
| | SKAKGQPREPQVCTL |
| | PPSQEEMTENQVSLT |
| | CLVKGFYPSDIAVEW |
| | ESNGQPENNYKTTPP |
| | VLDSDGSFFLYSWLT |
| | VDKSRWQEGNVFSCS |
| | VMHEALHNHYTQKSL |
| | SLSLG |
| | (SEQ ID NO: 222) |
| IgG4 hinge-Fc | RVESKYGPPCPPCPA |
| S228P/Q347R/ | PEFLGGPSVFLFPPK |
| S354C/D399V/ | PKDTLMISRTPEVTC |
| F405T | VVVDVSQEDPEVQFN |
| | WYVDGVEVHNAKTKP |
| | REEQFNSTYRVVSVL |
| | TVLHQDWLNGKEYKC |
| | KVSNKGLPSSIEKTI |
| | SKAKGQPREPRVYTL |
| | PPCQEEMTKNQVSLT |
| | CLVKGFYPSDIAVEW |
| | ESNGQPENNYKTTPP |
| | VLVSDGSFTLYSRLT |
| | VDKSRWQEGNVFSCS |
| | VMHEALHNHYTQKSL |
| | SLSLG |
| | (SEQ ID NO: 223) |
| IgG4 hinge-Fc | RVESKYGPPCPPCPA |
| S228P/L235E/ | PEFEGGPSVFLFPPK |
| Y349C/K360E/ | PKDTLMISRTPEVTC |
| R409W | VVVDVSQEDPEVQFN |
| | WYVDGVEVHNAKTKP |
| | REEQFNSTYRVVSVL |
| | TVLHQDWLNGKEYKC |
| | KVSNKGLPSSIEKTI |
| | SKAKGQPREPQVCTL |
| | PPSQEEMTENQVSLT |
| | CLVKGFYPSDIAVEW |
| | ESNGQPENNYKTTPP |
| | VLDSDGSFFLYSWLT |
| | VDKSRWQEGNVFSCS |
| | VMHEALHNHYTQKSL |
| | SLSLG |
| | (SEQ ID NO: 224) |
| IgG4 hinge-Fc | RVESKYGPPCPPCPA |
| S228P/L235E/ | PEFEGGPSVFLFPPK |
| S354C/Q347R/ | PKDTLMISRTPEVTC |
| D399V/F405T | VVVDVSQEDPEVQFN |
| | WYVDGVEVHNAKTKP |
| | REEQFNSTYRVVSVL |
| | TVLHQDWLNGKEYKC |
| | KVSNKGLPSSIEKTI |
| | SKAKGQPREPRVYTL |
| | PPCQEEMTKNQVSLT |
| | CLVKGFYPSDIAVEW |
| | ESNGQPENNYKTTPP |
| | VLVSDGSFTLYSRLT |
| | VDKSRWQEGNVFSCS |
| | VMHEALHNHYTQKSL |
| | SLSLG |
| | (SEQ ID NO: 225) |
| IgG4 hinge-Fc | RVESKYGPPCPPCPA |
| S228P/L235E/ | PEFEGGPSVFLFPPK |
| P329A/Y349C/ | PKDTLMISRTPEVTC |
| K360E/R409W | VVVDVSQEDPEVQFN |
| | WYVDGVEVHNAKTKP |
| | REEQFNSTYRVVSVL |
| | TVLHQDWLNGKEYKC |
| | KVSNKGLASSIEKTI |
| | SKAKGQPREPQVCTL |
| | PPSQEEMTENQVSLT |
| | CLVKGFYPSDIAVEW |
| | ESNGQPENNYKTTPP |
| | VLDSDGSFFLYSWLT |
| | VDKSRWQEGNVFSCS |
| | VMHEALHNHYTQKSL |
| | SLSLG |
| | (SEQ ID NO: 226) |
| IgG4 hinge-Fc | RVESKYGPPCPPCPA |
| S228P/L235E/ | PEFEGGPSVFLFPPK |
| P329A/S354C/ | PKDTLMISRTPEVTC |
| Q347R D399V/ | VVVDVSQEDPEVQFN |
| F405T | WYVDGVEVHNAKTKP |
| | REEQFNSTYRVVSVL |
| | TVLHQDWLNGKEYKC |
| | KVSNKGLASSIEKTI |
| | SKAKGQPREPRVYTL |
| | PPCQEEMTKNQVSLT |
| | CLVKGFYPSDIAVEW |
| | ESNGQPENNYKTTPP |
| | VLVSDGSFTLYSRLT |
| | VDKSRWQEGNVFSCS |
| | VMHEALHNHYTQKSL |
| | SLSLG |
| | (SEQ ID NO: 227) |
| IgG1 hinge- | EPKSSDKTHTCPPCP |
| Fc C220S | APELLGGPSVFLFPP |
| | KPKDTLMISRTPEVT |
| | CVVVDVSHEDPEVKF |
| | NWYVDGVEVHNAKTK |
| | PREEQYNSTYRVVSV |
| | LTVLHQDWLNGKEYK |
| | CKVSNKALPAPIEKT |
| | ISKAKGQPREPQVYT |
| | LPPSRDELTKNQVSL |
| | TCLVKGFYPSDIAVE |
| | WESNGQPENNYKTTP |
| | PVLDSDGSFFLYSKL |
| | TVDKSRWQQGNVFSC |
| | SVMHEALHNHYTQKS |
| | LSLSPG |
| | (SEQ ID NO: 228) |
| IgG1 hinge-Fc | PKSSDKTHTCPPCPA |
| ΔE216/C220S | PELLGGPSVFLFPPK |
| | PKDTLMISRTPEVTC |
| | VVVDVSHEDPEVKFN |
| | WYVDGVEVHNAKTKP |
| | REEQYNSTYRVVSVL |
| | TVLHQDWLNGKEYKC |
| | KVSNKALPAPIEKTI |
| | SKAKGQPREPQVYTL |
| | PPSRDELTKNQVSLT |
| | CLVKGFYPSDIAVEW |
| | ESNGQPENNYKTTPP |
| | VLDSDGSFFLYSKLT |
| | VDKSRWQQGNVFSCS |
| | VMHEALHNHYTQKSL |
| | SLSPG |
| | (SEQIDNO250) |
| IgG1 hinge-Fc | EPKSSDKTHTCPPCP |
| C220S/Y349C/ | APELLGGPSVFLFPP |
| K360E/K409W | KPKDTLMISRTPEV |
| | TCVVVDVSH |
| | EDPEVKFNWYVDGVE |
| | VHNAKTKPREEQYNS |
| | TYRVVSVLTVLHQDW |
| | LNGKEYKCKVSNKAL |
| | PAPIEKTISKAKGQP |
| | REPQVCTLPPSRDEL |
| | TENQVSLTCLVKGFY |
| | PSDIAVEWESNGQPE |
| | NNYKTTPPVLDSDGS |
| | FFLYSWLTVDKSRWQ |
| | QGNVFSCSVMHEALH |
| | NHYTQKSLSLSPG |
| | (SEQ ID NO: 229) |
| IgG1 hinge-Fc | PKSSDKTHTCPPCPA |
| ΔE216/C220S/ | PELLGGPSVFLFPPK |
| Y349C/K360E/ | PKDTLMISRTPEVTC |
| K409W | VVVDVSHEDPEVKFN |
| | WYVDGVEVHNAKTKP |
| | REEQYNSTYRVVSVL |
| | TVLHQDWLNGKEYKC |
| | KVSNKALPAPIEKTI |
| | SKAKGQPREPQVCTL |
| | PPSRDELTENQVSLT |
| | CLVKGFYPSDIAVEW |
| | ESNGQPENNYKTTPP |
| | VLDSDGSFFLYSWLT |
| | VDKSRWQQGNVFSCS |
| | VMHEALHNHYTQKSL |
| | SLSPG |
| | (SEQ ID NO: 251) |
| IgG1 hinge-Fc | EPKSSDKTHTCPPCP |
| C220S/Q347R/ | APELLGGPSVFLFPP |
| S354C/D399V/ | KPKDTLMISRTPEVT |
| F405T | CVVVDVSHEDPEVKF |
| | NWYVDGVEVHNAKTK |
| | PREEQYNSTYRVVSV |
| | LTVLHQDWLNGKEYK |
| | CKVSNKALPAPIEKT |
| | ISKAKGQPREPRVYT |
| | LPPCRDELTKNQVSL |
| | TCLVKGFYPSDIAVE |
| | WESNGQPENNYKTTP |
| | PVLVSDGSFTLYSKL |
| | TVDKSRWQQGNVFSC |
| | SVMHEALHNHYTQKS |
| | LSLSPG |
| | (SEQ ID NO: 230) |
| IgG1 hinge-Fc | PKSSDKTHTCPPCPA |
| ΔE216/C220S/ | PELLGGPSVFLFPPK |
| Q347R S354C/ | PKDTLMISRTPEVTC |
| D399V/F405T | VVVDVSHEDPEVKFN |
| | WYVDGVEVHNAKTKP |
| | REEQYNSTYRVVSVL |
| | TVLHQDWLNGKEYKC |
| | KVSNKALPAPIEKTI |
| | SKAKGQPREPRVYTL |
| | PPCRDELTKNQVSLT |
| | CLVKGFYPSDIAVEW |
| | ESNGQPENNYKTTPP |
| | VLVSDGSFTLYSKLT |
| | VDKSRWQQGNVFSCS |
| | VMHEALHNHYTQKSL |
| | SLSPG |
| | (SEQ ID NO: 252) |
| IgG1 hinge-Fc | EPKSSDKTHTCPPCP |
| C220S/L234A/ | APEAAGGPSVFLFPP |
| L235A/Y349C/ | KPKDTLMISRTPEVT |
| K360E/K409W | CVVVDVSHEDPEVKF |
| | NWYVDGVEVHNAKTK |
| | PREEQYNSTYRVVSV |
| | LTVLHQDWLNGKEYK |
| | CKVSNKALPAPIEKT |
| | ISKAKGQPREPQVCT |
| | LPPSRDELTENQVSL |
| | TCLVKGFYPSDIAVE |
| | WESNGQPENNYKTTP |
| | PVLDSDGSFFLYSWL |
| | TVDKSRWQQGNVFSC |
| | SVMHEALHNHYTQKS |
| | LSLSPG |
| | (SEQ ID NO: 231) |
| IgG1 hinge-Fc | PKSSDKTHTCPPCPA |
| ΔE216/C220S/ | PEAAGGPSVFLFPPK |
| L234A L235A/ | PKDTLMISRTPEVTC |
| Y349C/K360E/ | VVVDVSHEDPEVKFN |
| K409W | WYVDGVEVHNAKTKP |
| | REEQYNSTYRVVSVL |
| | TVLHQDWLNGKEYKC |
| | KVSNKALPAPIEKTI |
| | SKAKGQPREPQVCTL |
| | PPSRDELTENQVSLT |
| | CLVKGFYPSDIAVEW |
| | ESNGQPENNYKTTPP |
| | VLDSDGSFFLYSWLT |
| | VDKSRVVQQGNVFSC |
| | SVMHEALHNHYTQKS |
| | LSLSPG |
| | (SEQ ID NO: 253) |
| IgG1 hinge-Fc | EPKSSDKTHTCPPCP |
| C220S/L234A/ | APEAAGGPSVFLFPP |
| L235A/Q347R | KPKDTLMISRTPEVT |
| S354C/D399V/ | CVVVDVSHEDPEVKF |
| F405T | NWYVDGVEVHNAKTK |
| | PREEQYNSTYRVVSV |
| | LTVLHQDWLNGKEYK |
| | CKVSNKALPAPIEKT |
| | ISKAKGQPREPRVYT |
| | LPPCRDELTKNQVSL |
| | TCLVKGFYPSDIAVE |
| | WESNGQPENNYKTTP |
| | PVLVSDGSFTLYSKL |
| | TVDKSRWQQGNVFSC |
| | SVMHEALHNHYTQKS |
| | LSLSPG |
| | (SEQ ID NO: 232) |
| IgG1 hinge-Fc | PKSSDKTHTCPPCPA |
| ΔE216/C220S/ | PEAAGGPSVFLFPPK |
| L234A L235A7 | PKDTLMISRTPEVT |
| Q347R S354C/ | CVVVDVSH |
| D399V/F405T | EDPEVKFNWYVDGVE |
| | VHNAKTKPREEQYNS |
| | TYRVVSVLTVLHQDW |
| | LNGKEYKCKVSNKAL |
| | PAPIEKTISKAKGQP |
| | REPRVYTLPPCRDEL |
| | TKNQVSLTCLVKGFY |
| | PSDIAVEWESNGQPE |
| | NNYKTTPPVLVSDGS |
| | FTLYSKLTVDKSRWQ |
| | QGNVFSCSVMHEALH |
| | NHYTQKSLSLSPG |
| | (SEQ ID NO: 254) |
| IgG1 hinge-Fc | EPKSSDKTHTCPPCP |
| C220S/L234A/ | APEAAGGPSVFLFPP |
| L235A P329A | KPKDTLMISRTPEVT |
| Y349C/K360E/ | CVVVDVSHEDPEVKF |
| K409W | NWYVDGVEVHNAKTK |
| | PREEQYNSTYRVVSV |
| | LTVLHQDWLNGKEYK |
| | CKVSNKALAAPIEKT |
| | ISKAKGQPREPQVCT |
| | LPPSRDELTENQVSL |
| | TCLVKGFYPSDIAVE |
| | WESNGQPENNYKTTP |
| | PVLDSDGSFFLYSWL |
| | TVDKSRWQQGNVFSC |
| | SVMHEALHNHYTQKS |
| | LSLSPG |
| | (SEQ ID NO: 233) |
| IgG1 hinge-Fc | PKSSDKTHTCPPCPA |
| ΔE216/C220S/ | PEAAGGPSVFLFPPK |
| L234A/L235A/ | PKDTLMISRTPEVTC |
| P329A/Y349C/ | VVVDVSHEDPEVKFN |
| K360E/K409W | WYVDGVEVHNAKTKP |
| | REEQYNSTYRVVSVL |
| | TVLHQDWLNGKEYKC |
| | KVSNKALAAPIEKTI |
| | SKAKGQPREPQVCTL |
| | PPSRDELTENQVSLT |
| | CLVKGFYPSDIAVEW |
| | ESNGQPENNYKTTPP |
| | VLDSDGSFFLYSWLT |
| | VDKSRWQQGNVFSCS |
| | VMHEALHNHYTQKSL |
| | SLSPG |
| | (SEQ ID NO: 255) |
| IgG1 hinge-Fc | EPKSSDKTHTCPPCP |
| C220S/L234A/ | APEAAGGPSVFLFPP |
| L235A P329A | KPKDTLMISRTPEVT |
| Q347R S354C/ | CVVVDVSHEDPEVKF |
| D399V7 F405T | NWYVDGVEVHNAKTK |
| | PREEQYNSTYRVVSV |
| | LTVLHQDWLNGKEYK |
| | CKVSNKALAAPIEKT |
| | ISKAKGQPREPRVYT |
| | LPPCRDELTKNQVSL |
| | TCLVKGFYPSDIAVE |
| | WESNGQPENNYKTTP |
| | PVLVSDGSFTLYSKL |
| | TVDKSRWQQGNVFSC |
| | SVMHEALHNHYTQKS |
| | LSLSPG |
| | (SEQ ID NO: 234) |
| IgG1 hinge-Fc | PKSSDKTHTCPPCPA |
| ΔE216/C220S/ | PEAAGGPSVFLFPPK |
| L234A L235A/ | PKDTLMISRTPEVTC |
| P329A Q347R/ | VVVDVSHEDPEVKFN |
| S354C/D399V/ | WYVDGVEVHNAKTKP |
| F405T | REEQYNSTYRVVSVL |
| | TVLHQDWLNGKEYKC |
| | KVSNKALAAPIEKTI |
| | SKAKGQPREPRVYTL |
| | PPCRDELTKNQVSLT |
| | CLVKGFYPSDIAVEW |
| | ESNGQPENNYKTTPP |
| | VLVSDGSFTLYSKLT |
| | VDKSRWQQGNVFSCS |
| | VMHEALHNHYTQKSL |
| | SLSPG |
| | (SEQ ID NO: 256) |
| IgG1 hinge-Fc | EPKSSDKTHTCPPCP |
| C220S/L234A/ | APEAEGAPSVFLFPP |
| L235E/G237A/ | KPKDTLMISRTPEVT |
| A330S/P331S/ | CVVVDVSHEDPEVKF |
| Y349C/K360E/ | NWYVDGVEVHNAKTK |
| K409W | PREEQYNSTYRVVSV |
| | LTVLHQDWLNGKEYK |
| | CKVSNKALPSSIEKT |
| | ISKAKGQPREPQVCT |
| | LPPSRDELTENQVSL |
| | TCLVKGFYPSDIAVE |
| | WESNGQPENNYKTTP |
| | PVLDSDGSFFLYSWL |
| | TVDKSRVVQQGNVFS |
| | CSVMHEALHNHYTQK |
| | SLSLSPG |
| | (SEQ ID NO: 235) |
| IgG1 hinge-Fc | PKSSDKTHTCPPCPA |
| ΔE216/C220S/ | PEAEGAPSVFLFPPK |
| L234A/L235E/ | PKDTLMISRTPEVTC |
| G237A/A330S/ | VVVDVSHEDPEVKFN |
| P331S/Y349C/ | WYVDGVEVHNAKTKP |
| K360E/K409W | REEQYNSTYRVVSVL |
| | TVLHQDWLNGKEYKC |
| | KVSNKALPSSIEKTI |
| | SKAKGQPREPQVCTL |
| | PPSRDELTENQVSLT |
| | CLVKGFYPSDIAVEW |
| | ESNGQPENNYKTTPP |
| | VLDSDGSFFLYSWLT |
| | VDKSRWQQGNVFSCS |
| | VMHEALHNHYTQKSL |
| | SLSPG |
| | (SEQ ID NO: 257) |
| IgG1 hinge-Fc | EPKSSDKTHTCPPCP |
| C220S/L234A/ | APEAEGAPSVFLFPP |
| L235E/G237A/ | KPKDTLMISRTPEVT |
| A330S/P331S/ | CVVVDVSHEDPEVKF |
| Q347R S354C/ | NWYVDGVEVHNAKTK |
| D399V/F405T | PREEQYNSTYRVVSV |
| | LTVLHQDWLNGKEYK |
| | CKVSNKALPSSIEKT |
| | ISKAKGQPREPRVYT |
| | LPPCRDELTKNQVSL |
| | TCLVKGFYPSDIAVE |
| | WESNGQPENNYKTTP |
| | PVLVSDGSFTLYSKL |
| | TVDKSRWQQGNVFSC |
| | SVMHEALHNHYTQKS |
| | LSLSPG |
| | (SEQ ID NO: 236) |
| IgG1 hinge-Fc | PKSSDKTHTCPPCPA |
| ΔE216/C220S/ | PEAEGAPSVFLFPPK |
| L234A/L235E/ | PKDTLMISRTPEVTC |
| G237A/A330S/ | VVVDVSHEDPEVKFN |
| P331S/Q347R | WYVDGVEVHNAKTKP |
| S354C/D399V/ | REEQYNSTYRVVSVL |
| F405T | TVLHQDWLNGKEYKC |
| | KVSNKALPSSIEKTI |
| | SKAKGQPREPRVYTL |
| | PPCRDELTKNQVSLT |
| | CLVKGFYPSDIAVEW |
| | ESNGQPENNYKTTPP |
| | VLVSDGSFTLYSKLT |
| | VDKSRWQQGNVFSCS |
| | VMHEALHNHYTQKSL |
| | SLSPG |
| | (SEQ ID NO: 258) |

*The amino acid sequences can further comprise a lysine (K) at the C-terminus.

TABLE 4
Exemplary Heterodimeric Fc-Fused Polypeptide

| | | |
|---|---|---|
| | | Type of IgG (IL-12 |
| | | subunit); |
| Linker | Sequences of Heterodimeric | mutations/ |
| Sequence | Fc-fused Proteins* | substitutions |

Construct 101

| | | |
|---|---|---|
| RVESKYGPP | (SEQ ID NO: 129) | IgG4 (IL-12 p40) |
| CPPCPAPEFL | IWELKKDVYV VELDWYPDAP GEMVVLTCDT | Heterodimerization |
| GG (SEQ ID | PEEDGITWTL DQSSEVLGSG KTLTIQVKEF | mutations: |
| NO: 2) | GDAGQYTCHK GGEVLSHSLL LLHKKEDGIW | K370E/R409W |
| | STDILKDQKE PKNKTFLRCE AKNYSGRFTC | Substitution for |
| | WWLTTISTDL TFSVKSSRGS SDPQGVTCGA | stabilizing disulfide |
| | ATLSAERVRG DNKEYEYSVE CQEDSACPAA | bond: Y349C |
| | EESLPIEVMV DAVHKLKYEN YTSSFFIRDI | Substitution for |
| | IRPDPPKNLQ LKPLKNSRQV EVSWEYPDTW | preventing Fab-arm |
| | STPHSYFSLT FCVQVQGKSK REKKDRVFTD | exchange and |
| | KTSATVICRK NASISVRAQD RYYSSSWSEW | improving |
| | ASVPCSRVES KYGPPCPPCP APEFLGGPSV | thermostability: S228P |
| | FLFPPKPKDT LMISRTPEVT CVVVDVSQED | |
| | PEVQFNWYVD GVEVHNAKTK PREEQFNSTY | |
| | RVVSVLTVLH QDWLNGKEYK CKVSNKGLPS | |
| | SIEKTISKAK GQPREPQVCT LPPSQEEMTK | |
| | NQVSLTCLVE GFYPSDIAVE WESNGQPENN | |
| | YKTTPPVLDS DGSFFLYSWL TVDKSRWQEG | |
| | NVFSCSVMHE ALHNHYTQKS LSLSLG | |
| GGGGSGGG | (SEQ ID NO: 130) | IgG4 (IL-12 p35) |
| GSGGGGSRV | RNLPVATPDP GMFPCLHHSQ NLLRAVSNML | Heterodimeri/ation |
| ESKYGPPCPP | QKARQTLEFY PCTSEEIDHE DITKDKTSTV | mutations: |
| CPAPEFLGG | EACLPLELTK NESCLNSRET SFITNGSCLA | E357N/D399V/F405T |
| (SEQ ID | SRKTSFMMAL CLSSIYEDLK MYQVEFKTMN | Substitution for |
| NO: 3) | AKLLMDPKRQ IFLDQNMLAV IDELMQALNF | stabilizing disulfide |
| | NSETVPQKSS LEEPDFYKTK IKLCILLHAF | bond: S354C |
| | RIRAVTIDRV MSYLNASGGG GSGGGGSGGG | Substitution for |
| | GSRVESKYGP PCPPCPAPEF LGGPSVFLFP | preventing Fab-arm |
| | PKPKDTLMIS RTPEVTCVVV DVSQEDPEVQ | exchange and |
| | FNWYVDGVEV HNAKTKPREE QFNSTYRVVS | improving |
| | VLTVLHQDWL NGKEYKCKVS NKGLPSSIEK | thermostability: S228P |
| | TISKAKGQPR EPQVYTLPPC QENMTKNQVS | |
| | LTCLVKGFYP SDIAVEWESN GQPENNYKTT | |
| | PPVLVSDGSF TLYSRLTVDK SRWQEGNVFS | |
| | CSVMHEALHN HYTQKSLSLS LG | |

Construct 102

| | | |
|---|---|---|
| RVESKYGPP | (SEQ ID NO: 131) | IgG4 (IL-12 p40) |
| CPPCPAPEFL | IWELKKDVYV VELDWYPDAP GEMVVLTCDT | Heterodimerization |
| GG (SEQ ID | PEEDGITWTL DQSSEVLGSG KTLTIQVKEF | mutations: |
| NO: 2) | GDAGQYTCHK GGEVLSHSLL LLHKKEDGIW | K360E/R409W |
| | STDILKDQKE PKNKTFLRCE AKNYSGRFTC | Substitution for |
| | WWLTTISTDL TFSVKSSRGS SDPQGVTCGA | stabilizing disulfide |
| | ATLSAERVRG DNKEYEYSVE CQEDSACPAA | bond: Y349C |
| | EESLPIEVMV DAVHKLKYEN YTSSFFIRDI | Substitution for |
| | IKPDPPKNLQ LKPLKNSRQV EVSWEYPDTW | preventing Fab-arm |
| | STPHSYFSLT FCVQVQGKSK REKKDRVFTD | exchange and |
| | KTSATVICRK NASISVRAQD RYYSSSWSEW | improving |
| | ASVPCSRVES KYGPPCPPCP APEFLGGPSV | thermostability: S228P |
| | FLFPPKPKDT LMISRTPEVT CVVVDVSQED | |
| | PEVQFNWYVD GVEVHNAKTK PREEQFNSTY | |
| | RVVSVLTVLH QDWLNGKEYK CKVSNKGLPS | |
| | SIEKTISKAK GQPREPQVCT LPPSQEEMTE | |
| | NQVSLTCLVK GFYPSDIAVE WESNGQPENN | |
| | YKTTPPVLDS DGSFFLYSWL TVDKSRWQEG | |
| | NVFSCSVMHE ALHNHYTQKS LSLSLG | |
| GGGGSGGG | (SEQ ID NO: 132) | IgG4 (IL-12 p35) |
| GSGGGGSRV | RNLPVATPDP GMFPCLHHSQ NLLRAVSNML | Heterodimerization |
| ESKYGPPCPP | QKARQTLEFY PCTSEEIDHE DITKDKTSTV | mutations: |
| CPAPEFLGG | EACLPLELTK NESCLNSRET SFITNGSCLA | Q347R/D399V/F405T |
| (SEQ ID | SRKTSFMMAL CLSSIYEDLK MYQVEFKTMN | Substitution for |
| NO: 3) | AKLLMDPKRQ IFLDQNMLAV IDELMQALNF | stabilizing disulfide |
| | NSETVPQKSS LEEPDFYKTK IKLCILLHAF | bond: S354C |
| | RIRAVTIDRV MSYLNASGGG GSGGGGSGGG | Substitution for |
| | GSRVESKYGP PCPPCPAPEF LGGPSVFLFP | preventing Fab-arm |
| | PKPKDTLMIS RTPEVTCVVV DVSQEDPEVQ | exchange and |
| | FNWYVDGVEV HNAKTKPREE QFNSTYRVVS | improving |
| | VLTVLHQDWL NGKEYKCKVS NKGLPSSIEK | thermostability: S228P |
| | TISKAKGQPR EPRVYTLPPC QEEMTKNQVS | |
| | LTCLVKGFYP SDIAVEWESN GQPENNYKTT | |
| | PPVLVSDGSF TLYSRLTVDK SRWQEGNVFS | |
| | CSVMHEALHN HYTQKSLSLS LG | |

Construct 103

| | | |
|---|---|---|
| RVESKYGPP | (SEQ ID NO: 133) | IgG4 (IL-12 p40) |
| CPPCPAPEFE | IWELKKDVYV VELDWYPDAP GEMVVLTCDT | Heterodimerization |
| GG (SEQ ID | PEEDGITWTL DQSSEVLGSG KTLTIQVKEF | mutations: |
| NO: 4) | GDAGQYTCHK GGEVLSHSLL LLHKKEDGIW | K360E/R409W |
| | STDILKDQKE PKNKTFLRCE AKNYSGRFTC | Substitution for |
| | WWLTTISTDL TFSVKSSRGS SDPQGVTCGA | stabilizing disulfide |
| | ATLSAERVRG DNKEYEYSVE CQEDSACPAA | bond: Y349C |
| | EESLPIEVMV DAVHKLKYEN YTSSFFIRDI | Substitution for |
| | IKPDPPKNLQ LKPLKNSRQV EVSWEYPDTW | preventing Fab-arm |
| | STPHSYFSLT FCVQVQGKSK REKKDRVFTD | exchange and |
| | KTSATVICRK NASISVRAQD RYYSSSWSEW | improving |
| | ASVPCSRVES KYGPPCPPCP APEFEGGPSV | thermostability: S228P |
| | FLFPPKPKDT LMISRTPEVT CVVVDVSQED | Substitutions for |
| | PEVQFNWYVD GVEVHNAKTK PREEQFNSTY | reducing FcγR binding: |
| | RVVSVLTVLH QDWLNGKEYK CKVSNKGLPS | S228P and L235E |
| | SIEKTISKAK GQPREPQVCT LPPSQEEMTE | |
| | NQVSLTCLVK GFYPSDIAVE WESNGQPENN | |
| | YKTTPPVLDS DGSFFLYSWL TVDKSRWQEG | |
| | NVFSCSVMHE ALHNHYTQKS LSLSLG | |
| GGGGSGGG | (SEQ ID NO: 134) | IgG4 (IL-12 p35) |
| GSGGGGSRV | RNLPVATPDP GMFPCLHHSQ NLLRAVSNML | Heterodimerization |
| ESKYGPPCPP | QKARQTLEFY PCTSEEIDHE DITKDKTSTV | mutations: |
| CPAPEFEGG | EACLPLELTK NESCLNSRET SFITNGSCLA | Q347R/D399V/F405T |
| (SEQ ID | SRKTSFMMAL CLSSIYEDLK MYQVEFKTMN | Substitution for |
| NO: 5) | AKLLMDPKRQ IFLDQNMLAV IDELMQALNF | stabilizing disulfide |
| | NSETVPQKSS LEEPDFYKTK IKLCILLHAF | bond: S354C |
| | RIRAVTIDRV MSYLNASGGG GSGGGGSGGG | Substitution for |
| | GSRVESKYGP PCPPCPAPEF EGGPSVFLFP | preventing Fab-arm |
| | PKPKDTLMIS RTPEVTCVVV DVSQEDPEVQ | exchange and |
| | FNWYVDGVEV HNAKTKPREE QFNSTYRVVS | improving |
| | VLTVLHQDWL NGKEYKCKVS NKGLPSSIEK | thermostability: S228P |
| | TISKAKGQPR EPRVYTLPPC QEEMTKNQVS | Substitutions for |
| | LTCLVKGFYP SDIAVEWESN GQPENNYKTT | reducing FcγR binding: |
| | PPVLVSDGSF TLYSRLTVDK SRWQEGNVFS | S228P and L235E |
| | CSVMHEALHN HYTQKSLSLS LG | |

Construct 104

| | | |
|---|---|---|
| RVESKYGPP | (SEQ ID NO: 135) | IgG4 (IL-12 p40) |
| CPPCPAPEFE | IWELKKDVYV VELDWYPDAP GEMVVLTCDT | Heterodimerization |
| GG (SEQ ID | PEEDGITWTL DQSSEVLGSG KTLTIQVKEF | mutations: |
| NO: 4) | GDAGQYTCHK GGEVLSHSLL LLHKKEDGIW | K360E/R409W |
| | STDILKDQKE PKNKTFLRCE AKNYSGRFTC | Substitution for |
| | WWLTTISTDL TFSVKSSRGS SDPQGVTCGA | stabilizing disulfide |
| | ATLSAERVRG DNKEYEYSVE CQEDSACPAA | bond: Y349C |
| | EESLPIEVMV DAVHKLKYEN YTSSFFIRDI | Substitution for |
| | IKPDPPKNLQ LKPLKNSRQV EVSWEYPDTW | preventing Fab-arm |
| | STPHSYFSLT FCVQVQGKSK REKKDRVFTD | exchange and |
| | KTSATVICRK NASISVRAQD RYYSSSWSEW | improving |
| | ASVPCSRVES KYGPPCPPCP APEFEGGPSV | thermostability: S228P |
| | FLFPPKPKDT LMISRTPEVT CVVVDVSQED | Substitutions for |
| | PEVQFNWYVD GVEVHNAKTK PREEQFNSTY | reducing FcγR binding: |
| | RVVSVLTVLH QDWLNGKEYK CKVSNKGLAS | S228P, L235E, P329A |
| | SIEKTISKAK GQPREPQVCT LPPSQEEMTE | |
| | NQVSLTCLVK GFYPSDIAVE WESNGQPENN | |
| | YKTTPPVLDS DGSFFLYSWL TVDKSRWQEG | |
| | NVFSCSVMHE ALHNHYTQKS LSLSLG | |
| GGGGSGGG | (SEQ ID NO: 136) | IgG4 (IL-12 p35) |
| GSGGGGSRV | RNLPVATPDP GMFPCLHHSQ NLLRAVSNML | Heterodimerization |
| ESKYGPPCPP | QKARQTLEFY PCTSEEIDHE DITKDKTSTV | mutations: |
| CPAPEFEGG | EACLPLELTK NESCLNSRET SFITNGSCLA | Q347R/D399V/F405T |
| (SEQ ID | SRKTSFMMAL CLSSIYEDLK MYQVEFKTMN | Substitution for |
| NO: 5) | AKLLMDPKRQ IFLDQNMLAV IDELMQALNF | stabilizing disulfide |
| | NSETVPQKSS LEEPDFYKTK IKLCILLHAF | bond: S354C |
| | RIRAVTIDRV MSYLNASGGG GSGGGGSGGG | Substitution for |
| | GSRVESKYGP PCPPCPAPEF EGGPSVFLFP | preventing Fab-arm |
| | PKPKDTLMIS RTPEVTCVVV DVSQEDPEVQ | exchange and |
| | FNWYVDGVEV HNAKTKPREE QFNSTYRVVS | improving |
| | VLTVLHQDWL NGKEYKCKVS NKGLASSIEK | thermostability: S228P |
| | TISKAKGQPR EPRVYTLPPC QEEMTKNQVS | Substitutions for |
| | LTCLVKGFYP SDIAVEWESN GQPENNYKTT | reducing FcγR binding: |
| | PPVLVSDGSF TLYSRLTVDK SRWQEGNVFS | S228P, L235E, P329A |
| | CSVMHEALHN HYTQKSLSLS LG | |

Construct 106

| | | |
|---|---|---|
| EPKSSDKTH | (SEQ ID NO: 137) | IgG1 (IL-12 p40) |
| TCPPCPAPEL | IWELKKDVYV VELDWYPDAP GEMVVLTCDT | Heterodimerization |
| LGG (SEQ ID | PEEDGITWTL DQSSEVLGSG KTLTIQVKEF | mutations: |
| NO: 7) | GDAGQYTCHK GGEVLSHSLL LLHKKEDGIW | K360E/K409W |
| OR | STDILKDQKE PKNKTFLRCE AKNYSGRFTC | Substitution for |
| PKSSDKTHT | WWLTTISTDL TFSVKSSRGS SDPQGVTCGA | stabilizing disulfide |
| CPPCPAPELL | ATLSAERVRG DNKEYEYSVE CQEDSACPAA | bond: Y349C |
| GG (SEQ ID | EESLPIEVMV DAVHKLKYEN YTSSFFIRDI | C220 in the upper hinge |
| NO: 238) | IKPDPPKNLQ LKPLKNSRQV EVSWEYPDTW | is mutated to S |
| | STPHSYFSLT FCVQVQGKSK REKKDRVFTD | |
| | KTSATVICRK NASISVRAQD RYYSSSWSEW | |
| | ASVPCSEPKS SDKTHTCPPC PAPELLGGPS | |
| | VFLFPPKPKD TLMISRTPEV TCVVVDVSHE | |
| | DPEVKFNWYV DGVEVHNAKT KPREEQYNST | |
| | YRVVSVLTVL HQDWLNGKEY KCKVSNKALP | |
| | APIEKTISKA KGQPREPQVC TLPPSRDELT | |
| | ENQVSLTCLV KGFYPSDIAV EWESNGQPEN | |
| | NYKTTPPVLD SDGSFFLYSW LTVDKSRWQQ | |
| | GNVFSCSVMH EALHNHYTQK SLSLSPG | |
| | OR | |
| | (SEQ ID NO: 259) | |
| | IWELKKDVYV VELDWYPDAP GEMVVLTCDT | |
| | PEEDGITWTL DQSSEVLGSG KTLTIQVKEF | |
| | GDAGQYTCHK GGEVLSHSLL LLHKKEDGIW | |
| | STDILKDQKE PKNKTFLRCE AKNYSGRFTC | |
| | WWLTTISTDL TFSVKSSRGS SDPQGVTCGA | |
| | ATLSAERVRG DNKEYEYSVE CQEDSACPAA | |
| | EESLPIEVMV DAVHKLKYEN YTSSFFIRDI | |
| | IKPDPPKNLQ LKPLKNSRQV EVSWEYPDTW | |
| | STPHSYFSLT FCVQVQGKSK REKKDRVFTD | |
| | KTSATVICRK NASISVRAQD RYYSSSWSEW | |
| | ASVPCS PKSS DKTHTCPPC PAPELLGGPS | |
| | VFLFPPKPKD TLMISRTPEV TCVVVDVSHE | |
| | DPEVKFNWYV DGVEVHNAKT KPREEQYNST | |
| | YRVVSVLTVL HQDWLNGKEY KCKVSNKALP | |
| | APIEKTISKA KGQPREPQVC TLPPSRDELT | |
| | ENQVSLTCLV KGFYPSDIAV EWESNGQPEN | |
| | NYKTTPPVLD SDGSFFLYSWL TVDKSRWQQ | |
| | GNVFSCSVMH EALHNHYTQK SLSLSPG | |
| GGGGSGGG | (SEQ ID NO: 138) | IgG1 (IL-12 p35) |
| GSGGGGSEP | RNLPVATPDP GMFPCLHHSQ NLLRAVSNML | Heterodimerization |
| KSSDKTHTC | QKARQTLEFY PCTSEEIDHE DITKDKTSTV | mutations: |
| PPCPAPELLG | EACLPLELTK NESCLNSRET SFITNGSCLA | Q347R/D399V/F405T |
| G (SEQ ID | SRKTSFMMAL CLSSIYEDLK MYQVEFKTMN | Substitution for |
| NO: 8) | AKLLMDPKRQ IFLDQNMLAV IDELMQALNF | stabilizing disulfide |
| | NSETVPQKSS LEEPDFYKTK IKLCILLHAF | bond: S354C |
| | RIRAVTIDRV MSYLNASGGG GSGGGGSGGG | C220 in the upper hinge |
| | GS EPKSSDKT HTCPPCPAPE LLGGPSVFLF | is mutated to S |
| | PPKPKDTLMI SRTPEVTCVV VDVSHEDPEV | |
| | KFNWYVDGVE VHNAKTKPRE EQYNSTYRVV | |
| | SVLTVLHQDW LNGKEYKCKV SNKALPAPIE | |
| | KTISKAKGQP REPRVYTLPPCRDELTKNQV | |
| | SLTCLVKGFY PSDIAVEWES NGQPENNYKT | |
| | TPPVLVSDGSFTLYSKLTVD KSRWQQGNVF | |
| | SCSVMHEALH NHYTQKSLSL SPG | |

Construct 107

| | | |
|---|---|---|
| EPKSSDKTH | (SEQ ID NO: 139) | IgG1FcSilent |
| TCPPCPAPEA | IWELKKDVYV VELDWYPDAP GEMVVLTCDT | (IL-12 p40) |
| AGG (SEQ ID | PEEDGITWTL DQSSEVLGSG KTLTIQVKEF | Heterodimerization |
| NO: 9) | GDAGQYTCHK GGEVLSHSLL LLHKKEDGIW | mutations: |
| OR | STDILKDQKE PKNKTFLRCE AKNYSGRFTC | K360E/K409W |
| PKSSDKTHT | WWLTTISTDL TFSVKSSRGS SDPQGVTCGA | Substitution for |
| CPPCPAPEA | ATLSAERVRG DNKEYEYSVE CQEDSACPAA | stabilizing disulfide |
| AGG (SEQ ID | EESLPIEVMV DAVHKLKYEN YTSSFFIRDI | bond: Y349C |
| NO: 239) | IKPDPPKNLQ LKPLKNSRQV EVSWEYPDTW | Substitutions for |
| | STPHSYFSLT FCVQVQGKSK REKKDRVFTD | reducing FcγR binding: |
| | KTSATVICRK NASISVRAQD RYYSSSWSEW | L234A, L235A |
| | ASVPCSEPKS SDKTHTCPPC PAPEAAGGPS | C220 in the upper hinge |
| | VFLFPPKPKD TLMISRTPEV TCVVVDVSHE | is mutated to S |
| | DPEVKFNWYV DGVEVHNAKT KPREEQYNST | |
| | YRVVSVLTVLHQDWLNGKEY KCKVSNKALP | |
| | APIEKTISKA KGQPREPQVC TLPPSRDELT | |
| | ENQVSLTCLV KGFYPSDIAV EWESNGQPEN | |
| | NYKTTPPVLD SDGSFFLYSWLTVDKSRWQQ | |
| | GNVFSCSVMH EALHNHYTQK SLSLSPG | |
| | OR | |
| | (SEQ ID NO: 260) | |
| | IWELKKDVYV VELDWYPDAP GEMVVLTCDT | |
| | PEEDGITWTL DQSSEVLGSG KTLTIQVKEF | |
| | GDAGQYTCHK GGEVLSHSLL LLHKKEDGIW | |
| | STDILKDQKE PKNKTFLRCE AKNYSGRFTC | |
| | WWLTTISTDL TFSVKSSRGS SDPQGVTCGA | |
| | ATLSAERVRG DNKEYEYSVE CQEDSACPAA | |
| | EESLPIEVMV DAVHKLKYEN YTSSFFIRDI | |
| | IKPDPPKNLQ LKPLKNSRQV EVSWEYPDTW | |
| | STPHSYFSLT FCVQVQGKSK REKKDRVFTD | |
| | KTSATVICRK NASISVRAQD RYYSSSWSEW | |
| | ASVPCS PKSS DKTHTCPPC PAPEAAGGPS | |
| | VFLFPPKPKD TLMISRTPEV TCVVVDVSHE | |
| | DPEVKFNWYV DGVEVHNAKT KPREEQYNST | |
| | YRVVSVLTVLHQDWLNGKEY KCKVSNKALP | |
| | APIEKTISKA KGQPREPQVC TLPPSRDELT | |
| | ENQVSLTCLV KGFYPSDIAV EWESNGQPEN | |
| | NYKTTPPVLD SDGSFFLYSWLTVDKSRWQQ | |
| | GNVFSCSVMH EALHNHYTQK SLSLSPG | |
| GGGGSGGG | (SEQ ID NO: 140) | IgG1FcSilent |
| GSGGGGSEP | RNLPVATPDP GMFPCLHHSQ NLLRAVSNML | (IL-12 p35) |
| KSSDKTHTC | QKARQTLEFY PCTSEEIDHE DITKDKTSTV | Heterodimerization |
| PPCPAPEAA | EACLPLELTK NESCLNSRET SFITNGSCLA | mutations: |
| GG (SEQ ID | SRKTSFMMAL CLSSIYEDLK MYQVEFKTMN | Q347R/D399V/F405T |
| NO: 10) | AKLLMDPKRQ IFLDQNMLAV IDELMQALNF | Substitution for |
| | NSETVPQKSS LEEPDFYKTK IKLCILLHAF | stabilizing disulfide |
| | RIRAVTIDRV MSYLNASGGG GSGGGGSGGG | bond: S354C |
| | GSEPKSSDKT HTCPPCPAPE AAGGPSVFLF | Substitutions for |
| | PPKPKDTLMI SRTPEVTCVV VDVSHEDPEV | reducing FcγR binding: |
| | KFNWYVDGVE VHNAKTKPRE EQYNSTYRVV | L234A, L235A |
| | SVLTVLHQDW LNGKEYKCKV SNKALPAPIE | C220 in the upper hinge |
| | KTISKAKGQP REPRVYTLPPCRDELTKNQV | is mutated to S |
| | SLTCLVKGFY PSDIAVEWES NGQPENNYKT | |
| | TPPVLVSDGS FTLYSKLTVD KSRWQQGNVF | |
| | SCSVMHEALH NHYTQKSLSL SPG | |

Construct 108

| | | |
|---|---|---|
| EPKSSDKTH | (SEQ ID NO: 141) | IgG1FcSilent |
| TCPPCPAPEA | IWELKKDVYV VELDWYPDAP GEMVVLTCDT | (IL-12 p40) |
| AGG (SEQ ID | PEEDGITWTL DQSSEVLGSG KTLTIQVKEF | Heterodimerization |
| NO: 9) | GDAGQYTCHK GGEVLSHSLL LLHKKEDGIW | mutations: |
| OR | STDILKDQKE PKNKTFLRCE AKNYSGRFTC | K360E/K409W |
| PKSSDKTHT | WWLTTISTDL TFSVKSSRGS SDPQGVTCGA | Substitution for |
| CPPCPAPEA | ATLSAERVRG DNKEYEYSVE CQEDSACPAA | stabilizing disulfide |
| AGG (SEQ ID | EESLPIEVMV DAVHKLKYEN YTSSFFIRDI | bond: Y349C |
| NO: 239) | IKPDPPKNLQ LKPLKNSRQV EVSWEYPDTW | Substitutions for |
| | STPHSYFSLT FCVQVQGKSK REKKDRVFTD | reducing FcγR binding: |
| | KTSATVICRK NASISVRAQD RYYSSSWSEW | L234A, L235A, P329A |
| | ASVPCSEPKS SDKTHTCPPC PAPEAAGGPS | C220 in the upper hinge |
| | VFLFPPKPKD TLMISRTPEVTCVVVDVSHE | is mutated to S |
| | DPEVKFNWYV DGVEVHNAKT KPREEQYNST | |
| | YRVVSVLTVL HQDWLNGKEYKCKVSNKALA | |
| | APIEKTISKA KGQPREPQVC | |
| | TLPPSRDELTENQVSLTCLV KGFYPSDIAV | |
| | EWESNGQPEN NYKTTPPVLD | |
| | SDGSFFLYSWLTVDKSRWQQ GNVFSCSVMH | |
| | EALHNHYTQK SLSLSPG | |
| | OR | |
| | (SEQ ID NO: 261) | |
| | IWELKKDVYV VELDWYPDAP GEMVVLTCDT | |
| | PEEDGITWTL DQSSEVLGSG KTLTIQVKEF | |
| | GDAGQYTCHK GGEVLSHSLL LLHKKEDGIW | |
| | STDILKDQKE PKNKTFLRCE AKNYSGRFTC | |
| | WWLTTISTDL TFSVKSSRGS SDPQGVTCGA | |
| | ATLSAERVRG DNKEYEYSVE CQEDSACPAA | |
| | EESLPIEVMV DAVHKLKYEN YTSSFFIRDI | |
| | IKPDPPKNLQ LKPLKNSRQV EVSWEYPDTW | |
| | STPHSYFSLT FCVQVQGKSK REKKDRVFTD | |
| | KTSATVICRK NASISVRAQD RYYSSSWSEW | |
| | ASVPCS PKSSDKTHTCPPC PAPEAAGGPS | |
| | VFLFPPKPKD TLMISRTPEVTCVVVDVSHE | |
| | DPEVKFNWYV DGVEVHNAKT KPREEQYNST | |
| | YRVVSVLTVL HQDWLNGKEYKCKVSNKALA | |
| | APIEKTISKA KGQPREPQVC | |
| | TLPPSRDELTENQVSLTCLV KGFYPSDIAV | |
| | EWESNGQPEN NYKTTPPVLD | |
| | SDGSFFLYSWLTVDKSRWQQ GNVFSCSVMH | |
| | EALHNHYTQK SLSLSPG | |
| GGGGSGGG | (SEQ ID NO: 142) | IgG1FcSilent |
| GSGGGGSEP | RNLPVATPDP GMFPCLHHSQ NLLRAVSNML | (IL-12 p35) |
| KSSDKTHTC | QKARQTLEFY PCTSEEIDHE DITKDKTSTV | Heterodimerization |
| PPCPAPEAA | EACLPLELTK NESCLNSRET SFITNGSCLA | mutations: |
| GG (SEQ ID | SRKTSFMMAL CLSSIYEDLK MYQVEFKTMN | Q347R/D399V/F405T |
| NO: 10) | AKLLMDPKRQ IFLDQNMLAV IDELMQALNF | Substitution for |
| | NSETVPQKSS LEEPDFYKTK IKLCILLHAF | stabilizing disulfide |
| | RIRAVTIDRV MSYLNASGGG GSGGGGSGGG | bond: S354C |
| | GSEPKSSDKT HTCPPCPAPE AAGGPSVFLF | Substitutions for |
| | PPKPKDTLMISRTPEVTCVV VDVSHEDPEV | reducing FcγR binding: |
| | KFNWYVDGVE VHNAKTKPRE EQYNSTYRVV | L234A, L235A, P329A |
| | SVLTVLHQDW LNGKEYKCKV SNKALAAPIE | C220 in the upper hinge |
| | KTISKAKGQP REPRVYTLPP CRDELTKNQV | is mutated to S |
| | SLTCLVKGFY PSDIAVEWES NGQPENNYKT | |
| | TPPVLVSDGS FTLYSKLTVD KSRWQQGNVF | |
| | SCSVMHEALH NHYTQKSLSL SPG | |

Construct 110

| | | |
|---|---|---|
| EPKSSDKTH | (SEQ ID NO: 143) | IgG1 Fc |
| TCPPCPAPEA | IWELKKDVYV VELDWYPDAP GEMVVLTCDT | (IL-12 p40) |
| EGA (SEQ ID | PEEDGITWTL DQSSEVLGSG KTLTIQVKEF | Heterodimerization |
| NO: 11) | GDAGQYTCHK GGEVLSHSLL LLHKKEDGIW | mutations: |
| OR | STDILKDQKE PKNKTFLRCE AKNYSGRFTC | K360E/K409W |
| PKSSDKTHT | WWLTTISTDL TFSVKSSRGS SDPQGVTCGA | Substitution for |
| CPPCPAPEAE | ATLSAERVRG DNKEYEYSVE CQEDSACPAA | stabilizing disulfide |
| GA (SEQ ID | EESLPIEVMV DAVHKLKYEN YTSSFFIRDI | bond: |
| NO: 240) | IKPDPPKNLQ LKPLKNSRQV EVSWEYPDTW | Y349CSubstitutions for |
| | STPHSYFSLT FCVQVQGKSK REKKDRVFTD | reducing FcγR and C1q |
| | KTSATVICRK NASISVRAQD RYYSSSWSEW | binding: L234A, |
| | ASVPCSEPKS SDKTHTCPPC PAPEAEGAPS | L235E, G237A, |
| | VFLFPPKPKD TLMISRTPEV TCVVVDVSHE | A330S,P331S |
| | DPEVKFNWYV DGVEVHNAKT KPREEQYNST | |
| | YRVVSVLTVL HQDWLNGKEY KCKVSNKALP | |
| | SSIEKTISKA KGQPREPQVC TLPPSRDELT | |
| | ENQVSLTCLV KGFYPSDIAV EWESNGQPEN | |
| | NYKTTPPVLD SDGSFFLYSW LTVDKSRWQQ | |
| | GNVFSCSVMH EALHNHYTQK SLSLSPG | |
| | OR | |
| | (SEQ ID NO: 262) | |
| | IWELKKDVYV VELDWYPDAP GEMVVLTCDT | |
| | PEEDGITWTL DQSSEVLGSG KTLTIQVKEF | |
| | GDAGQYTCHK GGEVLSHSLL LLHKKEDGIW | |
| | STDILKDQKE PKNKTFLRCE AKNYSGRFTC | |
| | WWLTTISTDL TFSVKSSRGS SDPQGVTCGA | |
| | ATLSAERVRG DNKEYEYSVE CQEDSACPAA | |
| | EESLPIEVMV DAVHKLKYEN YTSSFFIRDI | |
| | IKPDPPKNLQ LKPLKNSRQV EVSWEYPDTW | |
| | STPHSYFSLT FCVQVQGKSK REKKDRVFTD | |
| | KTSATVICRK NASISVRAQD RYYSSSWSEW | |
| | ASVPCS PKSS DKTHTCPPC PAPEAEGAPS | |
| | VFLFPPKPKD TLMISRTPEV TCVVVDVSHE | |
| | DPEVKFNWYV DGVEVHNAKT KPREEQYNST | |
| | YRVVSVLTVL HQDWLNGKEY KCKVSNKALP | |
| | SSIEKTISKA KGQPREPQVC TLPPSRDELT | |
| | ENQVSLTCLV KGFYPSDIAV EWESNGQPEN | |
| | NYKTTPPVLD SDGSFFLYSW LTVDKSRWQQ | |
| | GNVFSCSVMH EALHNHYTQK SLSLSPG | |
| GGGGSGGG | (SEQ ID NO: 144) | IgG1 Fc |
| GSGGGGSEP | RNLPVATPDP GMFPCLHHSQ NLLRAVSNML | (IL-12 p35) |
| KSSDKTHTC | QKARQTLEFY PCTSEEIDHE DITKDKTSTV | Heterodimerization |
| PPCPAPEAEG | EACLPLELTK NESCLNSRET SFITNGSCLA | mutations: |
| A (SEQ ID | SRKTSFMMAL CLSSIYEDLK MYQVEFKTMN | Q347R/D399V/F405T |
| NO: 12) | AKLLMDPKRQ IFLDQNMLAV IDELMQALNF | Substitution for |
| | NSETVPQKSS LEEPDFYKTK IKLCILLHAF | stabilizing disulfide |
| | RIRAVTIDRV MSYLNASGGGGSGGGGSGGG | bond: S354C |
| | GSEPKSSDKT HTCPPCPAPE AEGAPSVFLF | Substitutions for |
| | PPKPKDTLMISRTPEVTCVV VDVSHEDPEV | reducing FcγR and C1q |
| | KFNWYVDGVE VHNAKTKPRE EQYNSTYRVV | binding: L234A, |
| | SVLTVLHQDW LNGKEYKCKV SNKALPSSIE | L235E, G237A, |
| | KTISKAKGQP REPRVYTLPP CRDELTKNQV | A330S, P331S |
| | SLTCLVKGFY PSDIAVEWES NGQPENNYKT | |
| | TPPVLVSDGS FTLYSKLTVD KSRWQQGNVF | |
| | SCSVMHEALH NHYTQKSLSL SPG | |

Construct 111

| | | |
|---|---|---|
| RVESKYGPP | (SEQ ID NO: 145) | IgG4 Fc |
| CPPCPAPEFL | IWELKKDVYV VELDWYPDAP GEMVVLTCDT | (IL-12 p40) |
| | PEEDGITWTL DQSSEVLGSG KTLTIQVKEF | Heterodimerization |
| GG (SEQ ID | GDAGQYTCHK GGEVLSHSLL LLHKKEDGIW | mutations: |
| NO: 2) | STDILKDQKE PKNKTFLRCE AKNYSGRFTC | K370E/R409W |
| | WWLTTISTDL TFSVKSSRGS SDPQGVTCGA | Substitution for |
| | ATLSAERVRG DNKEYEYSVE CQEDSACPAA | stabilizing disulfide |
| | EESLPIEVMV DAVHKLKYEN YTSSFFIRDI | bond: Y349C |
| | IKPDPPKNLQ LKPLKNSRQV EVSWEYPDTW | Substitution for |
| | STPHSYFSLT FCVQVQGKSK REKKDRVFTD | preventing Fab-arm |
| | KTSATVICRK NASISVRAQD RYYSSSWSEW | exchange and |
| | ASVPCSRVES KYGPPCPPCP APEFLGGPSV | improving |
| | FLFPPKPKDT LMISRTPEVT CVVVDVSQED | thermostability: S22XP |
| | PEVQFNWYVD GVEVHNAKTK PREEQFNSTY | |
| | RVVSVLTVLH QDWLNGKEYK CKVSNKGLPS | |
| | SIEKTISKAK GQPREPQVCT LPPSQEEMTK | |
| | NQVSLTCLVE GFYPSDIAVE WESNGQPENN | |
| | YKTTPPVLDS DGSFFLYSWL TVDKSRWQEG | |
| | NVFSCSVMHE ALHNHYTQKS LSLSLG | |
| RVESKYGPP | (SEQ ID NO: 146) | IgG4 Fc |
| CPPCPAPEFL | RNLPVATPDP GMFPCLHHSQ NLLRAVSNML | (IL-12 p35) |
| GG (SEQ ID | QKARQTLEFY PCTSEEIDHE DITKDKTSTV | Heterodi merization |
| NO: 2) | EACLPLELTK NESCLNSRET SFITNGSCLA | mutations: |
| | SRKTSFMMAL CLSSIYEDLK MYQVEFKTMN | E357N/D399V/F405T |
| | AKLLMDPKRQ IFLDQNMLAV IDELMQALNF | Substitution for |
| | NSETVPQKSS LEEPDFYKTK IKLCILLHAF | stabilizing disulfide |
| | RIRAVTIDRVMSYLNASRVESKYGPPCPPC | bond: S354C |
| | PAPEFLGGPSVFLFPPKPKDTLMISRTPEVTCV | Substitution for |
| | VVDVSQEDPEVQFNWYV DGVEVHNAKT | preventing Fab-arm |
| | KPREEQFNST YRVVSVLTVL HQDWLNGKEY | exchange and |
| | KCKVSNKGLPSSIEKTISKAKGQPREPQVYTLP | improving |
| | PCQENMT KNQVSLTCLVKGFYPSDIAV | thermostability: S228P |
| | EWESNGQPEN NYKTTPPVLV SDGSFTLYSR | |
| | LTVDKSRWQEGNVFSCSVMH EALHNHYTQK | |
| | SLSLSLG | |

Construct 112

| | | |
|---|---|---|
| RVESKYGPP | (SEQ ID NO: 147) | IgG4 Fc |
| CPPCPAPEFL | IWELKKDVYV VELDWYPDAP GEMVVLTCDT | (IL-12 p40) |
| GG (SEQ ID | PEEDGITWTL DQSSEVLGSG KTLTIQVKEF | Heterodimerization |
| NO: 2) | GDAGQYTCHK GGEVLSHSLL LLHKKEDGIW | mutations: |
| | STDILKDQKE PKNKTFLRCE AKNYSGRFTC | K370E/R409W |
| | WWLTTISTDL TFSVKSSRGS SDPQGVTCGA | Substitution for |
| | ATLSAERVRG DNKEYEYSVE CQEDSACPAA | stabilizing disulfide |
| | EESLPIEVMV DAVHKLKYEN YTSSFFIRDI | bond: Y349C |
| | IKPDPPKNLQ LKPLKNSRQV EVSWEYPDTW | Substitution for |
| | STPHSYFSLT FCVQVQGKSK REKKDRVFTD | preventing Fab-arm |
| | KTSATVICRK NASISVRAQD RYYSSSWSEW | exchange and |
| | ASVPCSRVES KYGPPCPPCP APEFLGGPSV | improving |
| | FLFPPKPKDT LMISRTPEVT CVVVDVSQED | thermostability: S228P |
| | PEVQFNWYVD GVEVHNAKTK PREEQFNSTY | |
| | RVVSVLTVLH QDWLNGKEYK CKVSNKGLPS | |
| | SIEKTISKAK GQPREPQVCT LPPSQEEMTK | |
| | NQVSLTCLVE GFYPSDIAVE WESNGQPENN | |
| | YKTTPPVLDS DGSFFLYSWL TVDKSRWQEG | |
| | NVFSCSVMHE ALHNHYTQKS LSLSLG | |
| GGGGSRVES | (SEQ ID NO: 148) | IgG4 Fc |
| KYGPPCPPCP | RNLPVATPDP GMFPCLHHSQ NLLRAVSNML | (IL-12 p35) |
| APEFLGG | QKARQTLEFY PCTSEEIDHE DITKDKTSTV | Heterodimerization |
| (SEQ ID | EACLPLELTK NESCLNSRET SFITNGSCLA | mutations: |
| NO: 13) | SRKTSFMMAL CLSSIYEDLK MYQVEFKTMN | E357N/D399V/F405T |
| | AKLLMDPKRQ IFLDQNMLAV IDELMQALNF | Substitution for |
| | NSETVPQKSS LEEPDFYKTK IKLCILLHAF | stabilizing disulfide |
| | RIRAVTIDRV MSYLNASGGG GSRVESKYGP | bond: S354C |
| | PCPPCPAPEF LGGPSVFLFP PKPKDTLMIS | Substitution for |
| | RTPEVTCVVV DVSQEDPEVQ FNWYVDGVEV | preventing Fab-arm |
| | HNAKTKPREE QFNSTYRVVS VLTVLHQDWL | exchange and |
| | NGKEYKCKVS NKGLPSSIEK TISKAKGQPR | improving |
| | EPQVYTLPPC QENMTKNQVS LTCLVKGFYP | thermostability: S228P |
| | SDIAVEWESN GQPENNYKTT PPVLVSDGSF | |
| | TLYSRLTVDK SRWQEGNVFS CSVMHEALHN | |
| | HYTQKSLSLS LG | |

Construct 113

| | | |
|---|---|---|
| RVESKYGPP | (SEQ ID NO: 149) | IgG4 Fc |
| CPPCPAPEFL | IWELKKDVYV VELDWYPDAP GEMVVLTCDT | (IL-12 p40) |
| GG (SEQ ID | PEEDGITWTL DQSSEVLGSG KTLTIQVKEF | Heterodimerization |
| NO: 2) | GDAGQYTCHK GGEVLSHSLL LLHKKEDGIW | mutations: |
| | STDILKDQKE PKNKTFLRCE AKNYSGRFTC | K370E/R409W |
| | WWLTTISTDL TFSVKSSRGS SDPQGVTCGA | Substitution for |
| | ATLSAERVRG DNKEYEYSVE CQEDSACPAA | stabilizing disulfide |
| | EESLPIEVMV DAVHKLKYEN YTSSFFIRDI | bond: Y349C |
| | IKPDPPKNLQ LKPLKNSRQV EVSWEYPDTW | Substitution for |
| | STPHSYFSLT FCVQVQGKSK REKKDRVFTD | preventing Fab-arm |
| | KTSATVICRK NASISVRAQD RYYSSSWSEW | exchange and |
| | ASVPCSRVES KYGPPCPPCP APEFLGGPSV | improving |
| | FLFPPKPKDT LMISRTPEVT CVVVDVSQED | thermostability: S228P |
| | PEVQFNWYVD GVEVHNAKTK PREEQFNSTY | |
| | RVVSVLTVLH QDWLNGKEYK CKVSNKGLPS | |
| | SIEKTISKAK GQPREPQVCT LPPSQEEMTK | |
| | NQVSLTCLVE GFYPSDIAVE WESNGQPENN | |
| | YKTTPPVLDS DGSFFLYSWL TVDKSRWQEG | |
| | NVFSCSVMHE ALHNHYTQKS LSLSLG | |
| GGGGSGGG | (SEQ ID NO: 150) | IgG4 Fc |
| GSRVESKYG | RNLPVATPDP GMFPCLHHSQ NLLRAVSNML | (IL-12 p35) |
| PPCPPCPAPE | QKARQTLEFY PCTSEEIDHE DITKDKTSTV | Heterodimerization |
| FLGG (SEQ | EACLPLELTK NESCLNSRET SFITNGSCLA | mutations: |
| ID NO: 14) | SRKTSFMMAL CLSSIYEDLK MYQVEFKTMN | E357N/D399V/F405T |
| | AKLLMDPKRQ IFLDQNMLAV IDELMQALNF | Substitution for |
| | NSETVPQKSS LEEPDFYKTK IKLCILLHAF | stabilizing disulfide |
| | RIRAVTIDRV MSYLNASGGGGSGGGGSRVE | bond: S354C |
| | SKYGPPCPPC PAPEFLGGPS VFLFPPKPKD | Substitution for |
| | TLMISRTPEVTCVVVDVSQE DPEVQFNWYV | preventing Fab-arm |
| | DGVEVHNAKT KPREEQFNST YRVVSVLTVL | exchange and |
| | HQDWLNGKEYKCKVSNKGLPSSIEKTISKA | improving |
| | KGQPREPQVYTLPPCQENMTKNQVSLTCLV | thermostability: S228P |
| | KGFYPSDIAVEWESNGQPEN NYKTTPPVLV | |
| | SDGSFTLYSRLTVDKSRWQE GNVFSCSVMH | |
| | EALHNHYTQK SLSLSLG | |

Construct 114

| | | |
|---|---|---|
| EPKSSDKTH | (SEQ ID NO: 151) | IgG1 Fc |
| TCPPCPAPEL | IWELKKDVYV VELDWYPDAP GEMVVLTCDT | (IL-12 p40) |
| LGG (SEQ ID | PEEDGITWTL DQSSEVLGSG KTLTIQVKEF | Heterodimerization |
| NO: 7) | GDAGQYTCHK GGEVLSHSLL LLHKKEDGIW | mutations: |
| OR | STDILKDQKE PKNKTFLRCE AKNYSGRFTC | K360E/K409W |
| PKSSDKTHT | WWLTTISTDL TFSVKSSRGS SDPQGVTCGA | Substitution for |
| CPPCPAPELL | ATLSAERVRG DNKEYEYSVE CQEDSACPAA | stabilizing disulfide |
| GG (SEQ ID | EESLPIEVMV DAVHKLKYEN YTSSFFIRDI | bond: Y349C |
| NO: 238) | IKPDPPKNLQ LKPLKNSRQV EVSWEYPDTW | C220 in the upper hinge |
| | STPHSYFSLT FCVQVQGKSK REKKDRVFTD | is mutated to S |
| | KTSATVICRK NASISVRAQD RYYSSSWSEW | |
| | ASVPCSEPKS SDKTHTCPPC PAPELLGGPS | |
| | VFLFPPKPKD TLMISRTPEVTCVVVDVSHE | |
| | DPEVKFNWYV DGVEVHNAKT KPREEQYNST | |
| | YRVVSVLTVLHQDWLNGKEY KCKVSNKALP | |
| | APIEKTISKA KGQPREPQVC TLPPSRDELT | |
| | ENQVSLTCLV KGFYPSDIAV EWESNGQPEN | |
| | NYKTTPPVLD SDGSFFLYSWLTVDKSRWQQ | |
| | GNVFSCSVMH EALHNHYTQK SLSLSPG | |
| | OR | |
| | (SEQ ID NO: 263) | |
| | IWELKKDVYV VELDWYPDAP GEMVVLTCDT | |
| | PEEDGITWTL DQSSEVLGSG KTLTIQVKEF | |
| | GDAGQYTCHK GGEVLSHSLL LLHKKEDGIW | |
| | STDILKDQKE PKNKTFLRCE AKNYSGRFTC | |
| | WWLTTISTDL TFSVKSSRGS SDPQGVTCGA | |
| | ATLSAERVRG DNKEYEYSVE CQEDSACPAA | |
| | EESLPIEVMV DAVHKLKYEN YTSSFFIRDI | |
| | IKPDPPKNLQ LKPLKNSRQV EVSWEYPDTW | |
| | STPHSYFSLT FCVQVQGKSK REKKDRVFTD | |
| | KTSATVICRK NASISVRAQD RYYSSSWSEW | |
| | ASVPCSPKS SDKTHTCPPC PAPELLGGPS | |
| | VFLFPPKPKD TLMISRTPEVTCVVVDVSHE | |
| | DPEVKFNWYV DGVEVHNAKT KPREEQYNST | |
| | YRVVSVLTVLHQDWLNGKEY KCKVSNKALP | |
| | APIEKTISKA KGQPREPQVC TLPPSRDELT | |
| | ENQVSLTCLV KGFYPSDIAV EWESNGQPEN | |
| | NYKTTPPVLD SDGSFFLYSWLTVDKSRWQQ | |
| | GNVFSCSVMH EALHNHYTQK SLSLSPG | |
| EPKSSDKTH | (SEQ ID NO: 152) | IgG1 Fc |
| TCPPCPAPEL | RNLPVATPDP GMFPCLHHSQ NLLRAVSNML | (IL-12 p35) |
| LGG (SEQ ID | QKARQTLEFY PCTSEEIDHE DITKDKTSTV | Heterodimerization |
| NO: 7) | EACLPLELTK NESCLNSRET SFITNGSCLA | mutations: |
| | SRKTSFMMAL CLSSIYEDLK MYQVEFKTMN | Q347R/D399V/F405T |
| | AKLLMDPKRQ IFLDQNMLAV IDELMQALNF | Substitution for |
| | NSETVPQKSS LEEPDFYKTK IKLCILLHAF | stabilizing disulfide |
| | RIRAVTIDRV MSYLNASEPKSSDKTHTCPP | bond: S354C |
| | CPAPELLGGP SVFLFPPKPK DTLMISRTPE | C220 in the upper hinge |
| | VTCVVVDVSH EDPEVKFNWYVDGVEVHNAK | is mutated to S |
| | TKPREEQYNS TYRVVSVLTV LHQDWLNGKE | |
| | YKCKVSNKALPAPIEKTISKAKGQPREPRVYTL | |
| | PPCRDELTKNQVSLTCLVKGFYPSDIAVEWES | |
| | NGQPENNYKTTPPVLVSDGSFTLYSKLTVDKS | |
| | RWQQGNVFSCSVM HEALHNHYTQ | |
| | KSLSLSPG | |

Construct 115

| | | |
|---|---|---|
| EPKSSDKTH | (SEQ ID NO: 153) | IgG1 Fc |
| TCPPCPAPEL | IWELKKDVYV VELDWYPDAP GEMVVLTCDT | (IL-12 p40) |
| | PEEDGITWTL DQSSEVLGSG KTLTIQVKEF | Heterodimerization |
| LGG (SEQ ID | GDAGQYTCHK GGEVLSHSLL LLHKKEDGIW | mutations: |
| NO: 7) | STDILKDQKE PKNKTFLRCE AKNYSGRFTC | K360E/K409W |
| OR | WWLTTISTDL TFSVKSSRGS SDPQGVTCGA | Substitution for |
| PKSSDKTHT | ATLSAERVRG DNKEYEYSVE CQEDSACPAA | stabilizing disulfide |
| CPPCPAPELL | EESLPIEVMV DAVHKLKYEN YTSSFFIRDI | bond: Y349C |
| GG (SEQ ID | IKPDPPKNLQ LKPLKNSRQV EVSWEYPDTW | C220 in the upper hinge |
| NO: 238) | STPHSYFSLT FCVQVQGKSK REKKDRVFTD | is mutated to S |
| | KTSATVICRK NASISVRAQD RYYSSSWSEW | |
| | ASVPCSEPKS SDKTHTCPPC PAPELLGGPS | |
| | VFLFPPKPKD TLMISRTPEVTCVVVDVSHE | |
| | DPEVKFNWYV DGVEVHNAKT KPREEQYNST | |
| | YRVVSVLTVLHQDWLNGKEY KCKVSNKALP | |
| | APIEKTISKA KGQPREPQVCTLPPSRDELT | |
| | ENQVSLTCLV KGFYPSDIAV EWESNGQPEN | |
| | NYKTTPPVLD SDGSFFLYSWLTVDKSRWQQ | |
| | GNVFSCSVMH EALHNHYTQK SLSLSPG | |
| | OR | |
| | (SEQ ID NO: 264) | |
| | IWELKKDVYV VELDWYPDAP GEMVVLTCDT | |
| | PEEDGITWTL DQSSEVLGSG KTLTIQVKEF | |
| | GDAGQYTCHK GGEVLSHSLL LLHKKEDGIW | |
| | STDILKDQKE PKNKTFLRCE AKNYSGRFTC | |
| | WWLTTISTDL TFSVKSSRGS SDPQGVTCGA | |
| | ATLSAERVRG DNKEYEYSVE CQEDSACPAA | |
| | EESLPIEVMV DAVHKLKYEN YTSSFFIRDI | |
| | IKPDPPKNLQ LKPLKNSRQV EVSWEYPDTW | |
| | STPHSYFSLT FCVQVQGKSK REKKDRVFTD | |
| | KTSATVICRK NASISVRAQD RYYSSSWSEW | |
| | ASVPCSPKS SDKTHTCPPC PAPELLGGPS | |
| | VFLFPPKPKD TLMISRTPEVTCVVVDVSHE | |
| | DPEVKFNWYV DGVEVHNAKT KPREEQYNST | |
| | YRVVSVLTVLHQDWLNGKEY KCKVSNKALP | |
| | APIEKTISKA KGQPREPQVCTLPPSRDELT | |
| | ENQVSLTCLV KGFYPSDIAV EWESNGQPEN | |
| | NYKTTPPVLD SDGSFFLYSWLTVDKSRWQQ | |
| | GNVFSCSVMH EALHNHYTQK SLSLSPG | |
| GGGGSEPKS | (SEQ ID NO: 154) | IgG1 Fc |
| SDKTHTCPP | RNLPVATPDP GMFPCLHHSQ NLLRAVSNML | (IL-12 p35) |
| CPAPE LLGG | QKARQTLEFY PCTSEEIDHE DITKDKTSTV | Heterodimerization |
| (SEQ ID | EACLPLELTK NESCLNSRET SFITNGSCLA | mutations: |
| NO: 15) | SRKTSFMMAL CLSSIYEDLK MYQVEFKTMN | Q347R/D399V/F405T |
| | AKLLMDPKRQ IFLDQNMLAV IDELMQALNF | Substitution for |
| | NSETVPQKSS LEEPDFYKTK IKLCILLHAF | stabilizing disulfide |
| | RIRAVTIDRV MSYLNASGGGGSEPKSSDKT | bond: S354C |
| | HTCPPCPAPE LLGGPSVFLF PPKPKDTLMI | C220 in the upper hinge |
| | SRTPEVTCVV VDVSHEDPEV KFNWYVDGVE | is mutated to S |
| | VHNAKTKPRE EQYNSTYRVV SVLTVLHQDW | |
| | LNGKEYKCKV SNKALPAPIE KTISKAKGQP | |
| | REPRVYTLPP CRDELTKNQV SLTCLVKGFY | |
| | PSDIAVEWES NGQPENNYKT TPPVLVSDGS | |
| | FTLYSKLTVD KSRWQQGNVF SCSVMHEALH | |
| | NHYTQKSLSL SPG | |

Construct 116

| | | |
|---|---|---|
| EPKSSDKTH | (SEQ ID NO: 155) | IgG1 Fc |
| TCPPCPAPEL | IWELKKDVYV VELDWYPDAP GEMVVLTCDT | (IL-12 p40) |
| LGG (SEQ ID | PEEDGITWTL DQSSEVLGSG KTLTIQVKEF | Heterodimerization |
| NOT) | GDAGQYTCHK GGEVLSHSLL LLHKKEDGIW | mutations: |
| OR | STDILKDQKE PKNKTFLRCE AKNYSGRFTC | K360E/K409W |
| PKSSDKTHT | WWLTTISTDL TFSVKSSRGS SDPQGVTCGA | Substitution for |
| CPPCPAPELL | ATLSAERVRG DNKEYEYSVE CQEDSACPAA | stabilizing disulfide |
| GG (SEQ ID | EESLPIEVMV DAVHKLKYEN YTSSFFIRDI | bond: Y349C |
| NO: 238) | IKPDPPKNLQ LKPLKNSRQV EVSWEYPDTW | C220 in the upper hinge |
| | STPHSYFSLT FCVQVQGKSK REKKDRVFTD | is mutated to S |
| | KTSATVICRK NASISVRAQD RYYSSSWSEW | |
| | ASVPCSEPKS SDKTHTCPPC PAPELLGGPS | |
| | VFLFPPKPKD TLMISRTPEVTCVVVDVSHE | |
| | DPEVKFNWYV DGVEVHNAKT KPREEQYNST | |
| | YRVVSVLTVLHQDWLNGKEY KCKVSNKALP | |
| | APIEKTISKA KGQPREPQVC TLPPSRDELT | |
| | ENQVSLTCLV KGFYPSDIAV EWESNGQPEN | |
| | NYKTTPPVLD SDGSFFLYSWLTVDKSRWQQ | |
| | GNVFSCSVMH EALHNHYTQK SLSLSPG | |
| | OR | |
| | (SEQ ID NO: 265) | |
| | IWELKKDVYV VELDWYPDAP GEMVVLTCDT | |
| | PEEDGITWTL DQSSEVLGSG KTLTIQVKEF | |
| | GDAGQYTCHK GGEVLSHSLL LLHKKEDGIW | |
| | STDILKDQKE PKNKTFLRCE AKNYSGRFTC | |
| | WWLTTISTDL TFSVKSSRGS SDPQGVTCGA | |
| | ATLSAERVRG DNKEYEYSVE CQEDSACPAA | |
| | EESLPIEVMV DAVHKLKYEN YTSSFFIRDI | |
| | IKPDPPKNLQ LKPLKNSRQV EVSWEYPDTW | |
| | STPHSYFSLT FCVQVQGKSK REKKDRVFTD | |
| | KTSATVICRK NASISVRAQD RYYSSSWSEW | |
| | ASVPCSPKS SDKTHTCPPC PAPELLGGPS | |
| | VFLFPPKPKD TLMISRTPEVTCVVVDVSHE | |
| | DPEVKFNWYV DGVEVHNAKT KPREEQYNST | |
| | YRVVSVLTVLHQDWLNGKEY KCKVSNKALP | |
| | APIEKTISKA KGQPREPQVC TLPPSRDELT | |
| | ENQVSLTCLV KGFYPSDIAV EWESNGQPEN | |
| | NYKTTPPVLD SDGSFFLYSWLTVDKSRWQQ | |
| | GNVFSCSVMH EALHNHYTQK SLSLSPG | |
| GGGGSGGG | (SEQ ID NO: 156) | IgG1 Fc |
| GSEPKSSDK | RNLPVATPDP GMFPCLHHSQ NLLRAVSNML | (IL-12 p35) |
| THTCPPCPAP | QKARQTLEFY PCTSEEIDHE DITKDKTSTV | Heterodimerization |
| ELLGG (SEQ | EACLPLELTK NESCLNSRET SFITNGSCLA | mutations: |
| ID NO: 16) | SRKTSFMMAL CLSSIYEDLK MYQVEFKTMN | Q347R/D399V/F405T |
| | AKLLMDPKRQ IFLDQNMLAV IDELMQALNF | Substitution for |
| | NSETVPQKSS LEEPDFYKTK IKLCILLHAF | stabilizing disulfide |
| | RIRAVTIDRVMSYLNASGGG GSGGGGSEPK | bond: S354C |
| | SSDKTHTCPPCPAPELLGGP SVFLFPPKPK | C220 in the upper hinge |
| | DTLMISRTPEVTCVVVDVSH EDPEVKFNWY | is mutated to S |
| | VDGVEVHNAK TKPREEQYNS | |
| | TYRVVSVLTVLHQDWLNGKE YKCKVSNKAL | |
| | PAPIEKTISK AKGQPREPRV | |
| | YTLPPCRDELTKNQVSLTCL VKGFYPSDIA | |
| | VEWESNGQPE NNYKTTPPVL | |
| | VSDGSFTLYSKLTVDKSRWQ QGNVFSCSVM | |
| | HEALHNHYTQ KSLSLSPG | |

Construct 117

| | | |
|---|---|---|
| GGGGSGGG | (SEQ ID NO: 157) | IgG1 Fc |
| GSGGGGSEP | RNLPVATPDP GMFPCLHHSQ NLLRAVSNML | (IL-12 p35) |
| KSSDKTHTC | QKARQTLEFY PCTSEEIDHE DITKDKTSTV | Heterodimerization |
| PPCPAPELLG | EACLPLELTK NESCLNSRET SFITNGSCLA | mutations: |
| G (SEQ ID | SRKTSFMMAL CLSSIYEDLK MYQVEFKTMN | K360E/K409W |
| NO: 8) | AKLLMDPKRQ IFLDQNMLAV IDELMQALNF | Substitution for |
| OR | NSETVPQKSS LEEPDFYKTK IKLCILLHAF | stabilizing disulfide |
| GGGGSGGG | RIRAVTIDRV MSYLNASGGG GSGGGGSGGG | bond: Y349C |
| GSGGGGSPK | GSEPKSSDKT HTCPPCPAPE LLGGPSVFLF | C220 in the upper hinge |
| SSDKTHTCPP | PPKPKDTLMI SRTPEVTCVV VDVSHEDPEV | is mutated to S |
| CPAPELLGG | KFNWYVDGVE VHNAKTKPRE EQYNSTYRVV | |
| (SEQ ID | SVLTVLHQDW LNGKEYKCKV SNKALPAPIE | |
| NO: 241) | KTISKAKGQP REPQVCTLPPSRDELTENQV | |
| | SLTCLVKGFY PSDIAVEWES NGQPENNYKT | |
| | TPPVLDSDGS FFLYSWLTVD KSRWQQGNVF | |
| | SCSVMHEALH NHYTQKSLSL SPG | |
| | OR | |
| | (SEQ ID NO: 266) | |
| | RNLPVATPDP GMFPCLHHSQ NLLRAVSNML | |
| | QKARQTLEFY PCTSEEIDHE DITKDKTSTV | |
| | EACLPLELTK NESCLNSRET SFITNGSCLA | |
| | SRKTSFMMAL CLSSIYEDLK MYQVEFKTMN | |
| | AKLLMDPKRQ IFLDQNMLAV IDELMQALNF | |
| | NSETVPQKSS LEEPDFYKTK IKLCILLHAF | |
| | RIRAVTIDRV MSYLNASGGG GSGGGGSGGG | |
| | GS PKSSDKT HTCPPCPAPE LLGGPSVFLF | |
| | PPKPKDTLMI SRTPEVTCVV VDVSHEDPEV | |
| | KFNWYVDGVE VHNAKTKPRE EQYNSTYRVV | |
| | SVLTVLHQDW LNGKEYKCKV SNKALPAPIE | |
| | KTISKAKGQP REPQVCTLPPSRDELTENQV | |
| | SLTCLVKGFY PSDIAVEWES NGQPENNYKT | |
| | TPPVLDSDGS FFLYSWLTVD KSRWQQGNVF | |
| | SCSVMHEALH NHYTQKSLSL SPG | |
| EPKSSDKTH | (SEQ ID NO: 158) | IgG1 Fc |
| TCPPCPAPEL | IWELKKDVYV VELDWYPDAP GEMVVLTCDT | (IL-12 p40) |
| LGG (SEQ ID | PEEDGITWTL DQSSEVLGSG KTLTIQVKEF | Heterodimerization |
| NO: 7) | GDAGQYTCHK GGEVLSHSLL LLHKKEDGIW | mutations: |
| | STDILKDQKE PKNKTFLRCE AKNYSGRFTC | Q347R D399V/F405T |
| | WWLTTISTDL TFSVKSSRGS SDPQGVTCGA | Substitution for |
| | ATLSAERVRG DNKEYEYSVE CQEDSACPAA | stabilizing disulfide |
| | EESLPIEVMV DAVHKLKYEN YTSSFFIRDI | bond: S354C |
| | IKPDPPKNLQ LKPLKNSRQV EVSWEYPDTW | C220 in the upper hinge |
| | STPHSYFSLT FCVQVQGKSK REKKDRVFTD | is mutated to S |
| | KTSATVICRK NASISVRAQD RYYSSSWSEW | |
| | ASVPCSEPKS SDKTHTCPPC PAPELLGGPS | |
| | VFLFPPKPKD TLMISRTPEV TCVVVDVSHE | |
| | DPEVKFNWYV DGVEVHNAKT KPREEQYNST | |
| | YRVVSVLTVL HQDWLNGKEY KCKVSNKALP | |
| | APIEKTISKA KGQPREPRVY TLPPCRDELT | |
| | KNQVSLTCLV KGFYPSDIAV EWESNGQPEN | |
| | NYKTTPPVLV SDGSFTLYSK LTVDKSRWQQ | |
| | GNVFSCSVMH EALHNHYTQK SLSLSPG | |

Construct 118

| | | |
|---|---|---|
| GGGGSEPKS | (SEQ ID NO: 159) | IgG1 (IL-12 p40) |
| SDKTHTCPP | IWELKKDVYV VELDWYPDAP GEMVVLTCDT | Heterodimerization |
| CPAPE LLGG | PEEDGITWTL DQSSEVLGSG KTLTIQVKEF | mutations: |
| (SEQ ID | GDAGQYTCHK GGEVLSHSLL LLHKKEDGIW | K360E/K409W |
| NO: 15) | STDILKDQKE PKNKTFLRCE AKNYSGRFTC | Substitution for |
| OR | WWLTTISTDL TFSVKSSRGS SDPQGVTCGA | stabilizing disulfide |
| GGGGSPKSS | ATLSAERVRG DNKEYEYSVE CQEDSACPAA | bond: Y349C |
| DKTHTCPPC | EESLPIEVMV DAVHKLKYEN YTSSFFIRDI | C220 in the upper hinge |
| PAPELLGG | IKPDPPKNLQ LKPLKNSRQV EVSWEYPDTW | is mutated to S |
| (SEQ ID | STPHSYFSLT FCVQVQGKSK REKKDRVFTD | |
| NO: 242) | KTSATVICRK NASISVRAQD RYYSSSWSEW | |
| | ASVPCSGGGG SEPKSSDKTH TCPPCPAPEL | |
| | LGGPSVFLFP PKPKDTLMIS RTPEVTCVVV | |
| | DVSHEDPEVK FNWYVDGVEV HNAKTKPREE | |
| | QYNSTYRVVS VLTVLHQDWL NGKEYKCKVS | |
| | NKALPAPIEK TISKAKGQPR EPQVCTLPPS | |
| | RDELTENQVS LTCLVKGFYP SDIAVEWESN | |
| | GQPENNYKTT PPVLDSDGSF FLYSWLTVDK | |
| | SRWQQGNVFS CSVMHEALHN HYTQKSLSLS | |
| | PG | |
| | OR | |
| | (SEQ ID NO: 267) | |
| | IWELKKDVYV VELDWYPDAP GEMVVLTCDT | |
| | PEEDGITWTL DQSSEVLGSG KTLTIQVKEF | |
| | GDAGQYTCHK GGEVLSHSLL LLHKKEDGIW | |
| | STDILKDQKE PKNKTFLRCE AKNYSGRFTC | |
| | WWLTTISTDL TFSVKSSRGS SDPQGVTCGA | |
| | ATLSAERVRG DNKEYEYSVE CQEDSACPAA | |
| | EESLPIEVMV DAVHKLKYEN YTSSFFIRDI | |
| | IKPDPPKNLQ LKPLKNSRQV EVSWEYPDTW | |
| | STPHSYFSLT FCVQVQGKSK REKKDRVFTD | |
| | KTSATVICRK NASISVRAQD RYYSSSWSEW | |
| | ASVPCSGGGGS PKSSDKTH TCPPCPAPEL | |
| | LGGPSVFLFP PKPKDTLMIS RTPEVTCVVV | |
| | DVSHEDPEVK FNWYVDGVEV HNAKTKPREE | |
| | QYNSTYRVVS VLTVLHQDWL NGKEYKCKVS | |
| | NKALPAPIEK TISKAKGQPR EPQVCTLPPS | |
| | RDELTENQVS LTCLVKGFYP SDIAVEWESN | |
| | GQPENNYKTT PPVLDSDGSF FLYSWLTVDK | |
| | SRWQQGNVFS CSVMHEALHN HYTQKSLSLS | |
| | PG | |
| GGGGSEPKS | (SEQ ID NO: 160) | IgG1 (IL-12 p35) |
| SDKTHTCPP | RNLPVATPDP GMFPCLHHSQ NLLRAVSNML | Heterodimerization |
| CPAPE LLGG | QKARQTLEFY PCTSEEIDHE DITKDKTSTV | mutations: |
| (SEQ ID | EACLPLELTK NESCLNSRET SFITNGSCLA | Q347R/D399V/F405T |
| NO: 15) | SRKTSFMMAL CLSSIYEDLK MYQVEFKTMN | Substitution for |
| | AKLLMDPKRQ IFLDQNMLAV IDELMQALNF | stabilizing disulfide |
| | NSETVPQKSS LEEPDFYKTK IKLCILLHAF | bond: S354C |
| | RIRAVTIDRV MSYLNAS GGG GSEPKSSDKT | C220 in the upper hinge |
| | HTCPPCPAPE LLGGPSVFLF PPKPKDTLMI | is mutated to S |
| | SRTPEVTCVV VDVSHEDPEV KFNWYVDGVE | |
| | VHNAKTKPRE EQYNSTYRVV SVLTVLHQDW | |
| | LNGKEYKCKV SNKALPAPIE KTISKAKGQP | |
| | REPRVYTLPP CRDELTKNQV SLTCLVKGFY | |
| | PSDIAVEWES NGQPENNYKT TPPVLVSDGS | |
| | FTLYSKLTVD KSRWQQGNVF SCSVMHEALH | |
| | NHYTQKSLSL SPG | |

Construct 119

| | | |
|---|---|---|
| GGGGSEPKS | (SEQ ID NO: 161) | IgG1 (IL-12 p40) |
| SDKTHTCPP | IWELKKDVYV VELDWYPDAP GEMVVLTCDT | Heterodimerization |
| CPAPE LLGG | PEEDGITWTL DQSSEVLGSG KTLTIQVKEF | mutations: |
| (SEQ ID | GDAGQYTCHK GGEVLSHSLL LLHKKEDGIW | K360E/K409W |
| NO: 15) | STDILKDQKE PKNKTFLRCE AKNYSGRFTC | p40 substitutions: |
| OR | WWLTTISTDL TFSVKSSRGS SDPQGVTCGA | C177S, Y292C |
| GGGGSPKSS | ATLSAERVRG DNKEYEYSVE CQEDSASPAA | (native disulfide bond |
| DKTHTCPPC | EESLPIEVMV DAVHKLKYEN YTSSFFIRDI | between subunits is |
| PAPELLGG | IKPDPPKNLQ LKPLKNSRQV EVSWEYPDTW | deleted) |
| (SEQ ID | STPHSYFSLT FCVQVQGKSK REKKDRVFTD | |
| NO: 242) | KTSATVICRK NASISVRAQD RCYSSSWSEW | |
| | ASVPCS GGGG SEPKSSDKTH TCPPCPAPEL | |
| | LGGPSVFLFP PKPKDTLMIS RTPEVTCVVV | |
| | DVSHEDPEVK FNWYVDGVEV HNAKTKPREE | |
| | QYNSTYRVVS VLTVLHQDWL NGKEYKCKVS | |
| | NKALPAPIEK TISKAKGQPR EPQVCTLPPS | |
| | RDELTENQVS LTCLVKGFYP SDIAVEWESN | |
| | GQPENNYKTT PPVLDSDGSF FLYSWLTVDK | |
| | SRWQQGNVFS CSVMHEALHN HYTQKSLSLS | |
| | PG | |
| | OR | |
| | (SEQ ID NO: 268) | |
| | IWELKKDVYV VELDWYPDAP GEMVVLTCDT | |
| | PEEDGITWTL DQSSEVLGSG KTLTIQVKEF | |
| | GDAGQYTCHK GGEVLSHSLL LLHKKEDGIW | |
| | STDILKDQKE PKNKTFLRCE AKNYSGRFTC | |
| | WWLTTISTDL TFSVKSSRGS SDPQGVTCGA | |
| | ATLSAERVRG DNKEYEYSVE CQEDSASPAA | |
| | EESLPIEVMV DAVHKLKYEN YTSSFFIRDI | |
| | IKPDPPKNLQ LKPLKNSRQV EVSWEYPDTW | |
| | STPHSYFSLT FCVQVQGKSK REKKDRVFTD | |
| | KTSATVICRK NASISVRAQD RCYSSSWSEW | |
| | ASVPCS GGGGS PKSSDKTH TCPPCPAPEL | |
| | LGGPSVFLFP PKPKDTLMIS RTPEVTCVVV | |
| | DVSHEDPEVK FNWYVDGVEV HNAKTKPREE | |
| | QYNSTYRVVS VLTVLHQDWL NGKEYKCKVS | |
| | NKALPAPIEK TISKAKGQPR EPQVCTLPPS | |
| | RDELTENQVS LTCLVKGFYP SDIAVEWESN | |
| | GQPENNYKTT PPVLDSDGSF FLYSWLTVDK | |
| | SRWQQGNVFS CSVMHEALHN HYTQKSLSLS | |
| | PG | |
| GGGGSEPKS | (SEQ ID NO: 162) | IgG1 (IL-12 p35) |
| SDKTHTCPP | RNLPVATPDP GMFPCLHHSQ NLLRAVSNML | Heterodimerization |
| CPAPE LLGG | QKARQTLEFY PCTSEEIDHE DITKDKTSTV | mutations: |
| (SEQ ID | EACLPLELTK NESSLNSRET SFITNGSCLA | Q347RD399V/F405T |
| NO: 15) | SRKTSFMMAL CLSSIYEDLK MYQVEFKTMN | p35 substitutions: C74S |
| | AKLLMDPKRQ IFLDQNMLAV IDELMQALNF | V185C |
| | NSETVPQKSS LEEPDFYKTK IKLCILLHAF | (native disulfide bond |
| | RIRACTIDRV MSYLNASGGGGSEPKSSDKT | between subunits is |
| | HTCPPCPAPE LLGGPSVFLF PPKPKDTLMI | deleted) |
| | SRTPEVTCVV VDVSHEDPEV KFNWYVDGVE | |
| | VHNAKTKPRE EQYNSTYRVV SVLTVLHQDW | |
| | LNGKEYKCKV SNKALPAPIE KTISKAKGQP | |
| | REPRVYTLPP CRDELTKNQV SLTCLVKGFY | |
| | PSDIAVEWES NGQPENNYKT TPPVLVSDGS | |
| | FTLYSKLTVD KSRWQQGNVF SCSVMHEALH | |
| | NHYTQKSLSL SPG | |

Construct 119-1

| | | |
|---|---|---|
| RVESKYGPP | (SEQ ID NO: 163) | IgG4 (IL-12 p40) |
| CPPCPAPEFL | IWELKKDVYV VELDWYPDAP GEMVVLTCDT | Heterodimerization |
| GG (SEQ ID | PEEDGITWTL DQSSEVLGSG KTLTIQVKEF | mutations: |
| NO: 2) | GDAGQYTCHK GGEVLSHSLL LLHKKEDGIW | K370E/R409W |
| | STDILKDQKE PKNKTFLRCE AKNYSGRFTC | p40 substitutions: |
| | WWLTTISTDL TFSVKSSRGS SDPQGVTCGA | C177S, Y292C |
| | ATLSAERVRG DNKEYEYSVE CQEDSASPAA | |
| | EESLPIEVMV DAVHKLKYEN YTSSFFIRDI | |
| | IKPDPPKNLQ LKPLKNSRQV EVSWEYPDTW | |
| | STPHSYFSLT FCVQVQGKSK REKKDRVFTD | |
| CPAPE LLGG | RNLPVATPDP GMFPCLHHSQ NLLRAVSNML | Heterodimerization |
| (SEQ ID | QKARQTLEFY PCTSEEIDHE DITKDKTSTV | mutations: |
| NO: 15) | EACLPLELTK NESCLNSRET SFITNGSCLA | Q347R/D399V/F405T |
| | SRKTSFMMAL CLSSIYEDLK MYQVEFKTMN | Substitution for |
| | AKLLMDPKRQ IFLDQNMLAV IDELMQALNF | stabilizing disulfide |
| | NSETVPQKSS LEEPDFYKTK IKLCILLHAF | bond: S354C |
| | RIRAVTIDRV MSYLNAS GGG GSEPKSSDKT | C220 in the upper hinge |
| | HTCPPCPAPE LLGGPSVFLF PPKPKDTLMI | is mutated to S |
| | SRTPEVTCVV VDVSHEDPEV KFNWYVDGVE | |
| | VHNAKTKPRE EQYNSTYRVV SVLTVLHQDW | |
| | LNGKEYKCKV SNKALPAPIE KTISKAKGQP | |
| | REPRVYTLPP CRDELTKNQV SLTCLVKGFY | |
| | PSDIAVEWES NGQPENNYKT TPPVLVSDGS | |
| | FTLYSKLTVD KSRWQQGNVF SCSVMHEALH | |
| | NHYTQKSLSL SPG | |

Construct 119

| | | |
|---|---|---|
| GGGGSEPKS | (SEQ ID NO: 161) | IgG1 (IL-12 p40) |
| SDKTHTCPP | IWELKKDVYV VELDWYPDAP GEMVVLTCDT | Heterodimerization |
| CPAPE LLGG | PEEDGITWTL DQSSEVLGSG KTLTIQVKEF | mutations: |
| (SEQ ID | GDAGQYTCHK GGEVLSHSLL LLHKKEDGIW | K360E/K409W |
| NO: 15) | STDILKDQKE PKNKTFLRCE AKNYSGRFTC | p40 substitutions: |
| OR | WWLTTISTDL TFSVKSSRGS SDPQGVTCGA | C177S, Y292C |
| GGGGSPKSS | ATLSAERVRG DNKEYEYSVE CQEDSASPAA | (native disulfide bond |
| DKTHTCPPC | EESLPIEVMV DAVHKLKYEN YTSSFFIRDI | between subunits is |
| PAPELLGG | IKPDPPKNLQ LKPLKNSRQV EVSWEYPDTW | deleted) |
| (SEQ ID | STPHSYFSLT FCVQVQGKSK REKKDRVFTD | |
| NO: 242) | KTSATVICRK NASISVRAQD RCYSSSWSEW | |
| | ASVPCS GGGG SEPKSSDKTH TCPPCPAPEL | |
| | LGGPSVFLFP PKPKDTLMIS RTPEVTCVVV | |
| | DVSHEDPEVK FNWYVDGVEV HNAKTKPREE | |
| | QYNSTYRVVS VLTVLHQDWL NGKEYKCKVS | |
| | NKALPAPIEK TISKAKGQPR EPQVCTLPPS | |
| | RDELTENQVS LTCLVKGFYP SDIAVEWESN | |
| | GQPENNYKTT PPVLDSDGSF FLYSWLTVDK | |
| | SRWQQGNVFS CSVMHEALHN HYTQKSLSLS | |
| | PG | |
| | OR | |
| | (SEQ ID NO: 268) | |
| | IWELKKDVYV VELDWYPDAP GEMVVLTCDT | |
| | PEEDGITWTL DQSSEVLGSG KTLTIQVKEF | |
| | GDAGQYTCHK GGEVLSHSLL LLHKKEDGIW | |
| | STDILKDQKE PKNKTFLRCE AKNYSGRFTC | |
| | WWLTTISTDL TFSVKSSRGS SDPQGVTCGA | |
| | ATLSAERVRG DNKEYEYSVE CQEDSASPAA | |
| | EESLPIEVMV DAVHKLKYEN YTSSFFIRDI | |
| | IKPDPPKNLQ LKPLKNSRQV EVSWEYPDTW | |
| | STPHSYFSLT FCVQVQGKSK REKKDRVFTD | |
| | KTSATVICRK NASISVRAQD RCYSSSWSEW | |
| | ASVPCS GGGGS PKSSDKTH TCPPCPAPEL | |
| | LGGPSVFLFP PKPKDTLMIS RTPEVTCVVV | |
| | DVSHEDPEVK FNWYVDGVEV HNAKTKPREE | |
| | QYNSTYRVVS VLTVLHQDWL NGKEYKCKVS | |
| | NKALPAPIEK TISKAKGQPR EPQVCTLPPS | |
| | RDELTENQVS LTCLVKGFYP SDIAVEWESN | |
| | GQPENNYKTT PPVLDSDGSF FLYSWLTVDK | |
| | SRWQQGNVFS CSVMHEALHN HYTQKSLSLS | |
| | PG | |
| GGGGSEPKS | (SEQ ID NO: 162) | IgG1 (IL-12 p35) |
| SDKTHTCPP | RNLPVATPDP GMFPCLHHSQ NLLRAVSNML | Heterodimerization |
| CPAPE LLGG | QKARQTLEFY PCTSEEIDHE DITKDKTSTV | mutations: |
| (SEQ ID | EACLPLELTK NESSLNSRET SFITNGSCLA | Q347RD399V/F405T |
| NO: 15) | SRKTSFMMAL CLSSIYEDLK MYQVEFKTMN | p35 substitutions: C74S |
| | AKLLMDPKRQ IFLDQNMLAV IDELMQALNF | V185C |
| | NSETVPQKSS LEEPDFYKTK IKLCILLHAF | (native disulfide bond |
| | RIRACTIDRV MSYLNASGGGGSEPKSSDKT | between subunits is |
| | HTCPPCPAPE LLGGPSVFLF PPKPKDTLMI | deleted) |
| | SRTPEVTCVV VDVSHEDPEV KFNWYVDGVE | |
| | VHNAKTKPRE EQYNSTYRVV SVLTVLHQDW | |
| | LNGKEYKCKV SNKALPAPIE KTISKAKGQP | |
| | REPRVYTLPP CRDELTKNQV SLTCLVKGFY | |
| | PSDIAVEWES NGQPENNYKT TPPVLVSDGS | |
| | FTLYSKLTVD KSRWQQGNVF SCSVMHEALH | |
| | NHYTQKSLSL SPG | |

Construct 119-1

| | | |
|---|---|---|
| RVESKYGPP | (SEQ ID NO: 163) | IgG4 (IL-12 p40) |
| CPPCPAPEFL | IWELKKDVYV VELDWYPDAP GEMVVLTCDT | Heterodimerization |
| GG (SEQ ID | PEEDGITWTL DQSSEVLGSG KTLTIQVKEF | mutations: |
| NO: 2) | GDAGQYTCHK GGEVLSHSLL LLHKKEDGIW | K370E/R409W |
| | STDILKDQKE PKNKTFLRCE AKNYSGRFTC | p40 substitutions: |
| | WWLTTISTDL TFSVKSSRGS SDPQGVTCGA | C177S, Y292C |
| | ATLSAERVRG DNKEYEYSVE CQEDSASPAA | (native disulfide bond |
| | EESLPIEVMV DAVHKLKYEN YTSSFFIRDI | between subunits is |
| | IKPDPPKNLQ LKPLKNSRQV EVSWEYPDTW | deleted) |
| | STPHSYFSLT FCVQVQGKSK REKKDRVFTD | Substitution for |
| | KTSATVICRK NASISVRAQD RCYSSSWSEW | preventing Fab-arm |
| | ASVPCS RVES KYGPPCPPCP APEFLGGPSV | exchange and |
| | FLFPPKPKDT LMISRTPEVT CVVVDVSQED | improving |
| | PEVQFNWYVD GVEVHNAKTK PREEQFNSTY | thermostability: S228P |
| | RVVSVLTVLH QDWLNGKEYK CKVSNKGLPS | |
| | SIEKTISKAK GQPREPQVCT LPPSQEEMTK | |
| | NQVSLTCLVE GFYPSDIAVE WESNGQPENN | |
| | YKTTPPVLDS DGSFFLYSWL TVDKSRWQEG | |
| | NVFSCSVMHE ALHNHYTQKS LSLSLG | |
| GGGGSGGG | (SEQ ID NO: 164) | !gG4 (IL-12 p35) |
| GSGGGGSRV | RNLPVATPDP GMFPCLHHSQ NLLRAVSNML | Heterodimerization |
| ESKYGPPCPP | QKARQTLEFY PCTSEEIDHE DITKDKTSTV | mutations: |
| CPAPEFLGG | EACLPLELTK NESSLNSRET SFITNGSCLA | E357N/D399V/F405T |
| (SEQ ID | SRKTSFMMAL CLSSIYEDLK MYQVEFKTMN | p35 substitutions: C74S |
| NO: 3) | AKLLMDPKRQ IFLDQNMLAV IDELMQALNF | V185C |
| | NSETVPQKSS LEEPDFYKTK IKLCILLHAF | Substitution for |
| | RIRACTIDRV MSYLNASGGG GSGGGGSGGG | preventing Fab-arm |
| | GSRVESKYGPPCPPCPAPEFLGGPSVFLFP | exchange and |
| | PKPKDTLMIS RTPEVTCVVV DVSQEDPEVQ | improving |
| | FNWYVDGVEV HNAKTKPREE QFNSTYRVVS | thermostability: S228P |
| | VLTVLHQDWL NGKEYKCKVS NKGLPSSIEK | |
| | TISKAKGQPR EPQVYTLPPCQENMTKNQVS | |
| | LTCLVKGFYP SDIAVEWESN GQPENNYKTT | |
| | PPVLVSDGSF TLYSRLTVDK SRWQEGNVFS | |
| | CSVMHEALHN HYTQKSLSLS LG | |

Construct 119-2

| | | |
|---|---|---|
| RVESKYGPP | (SEQ ID NO: 165) | IgG4 (IL-12 p40) |
| CPPCPAPEFL | IWELKKDVYV VELDWYPDAP GEMVVLTCDT | Heterodimerization |
| GG (SEQ ID | PEEDGITWTL DQSSEVLGSG KTLTIQVKEF | mutations: |
| NO: 2) | GDAGQYTCHK GGEVLSHSLL LLHKKEDGIW | K360E/R409W |
| | STDILKDQKE PKNKTFLRCE AKNYSGRFTC | p40 substitutions: |
| | WWLTTISTDL TFSVKSSRGS SDPQGVTCGA | C177S, Y292C |
| | ATLSAERVRG DNKEYEYSVE CQEDSASPAA | (native disulfide bond |
| | EESLPIEVMV DAVHKLKYEN YTSSFFIRDI | between subunits is |
| | IKPDPPKNLQ LKPLKNSRQV EVSWEYPDTW | deleted) |
| | STPHSYFSLT FCVQVQGKSK REKKDRVFTD | Substitution for |
| | KTSATVICRK NASISVRAQD RCYSSSWSEW | preventing Fab-arm |
| | ASVPCS RVES KYGPPCPPCP APEFLGGPSV | exchange and |
| | FLFPPKPKDT LMISRTPEVT CVVVDVSQED | improving |
| | PEVQFNWYVD GVEVHNAKTK PREEQFNSTY | thermostability: S228P |
| | RVVSVLTVLH QDWLNGKEYK CKVSNKGLPS | |
| | SIEKTISKAK GQPREPQVCT LPPSQEEMTE | |
| | NQVSLTCLVK GFYPSDIAVE WESNGQPENN | |
| | YKTTPPVLDS DGSFFLYSWL TVDKSRWQEG | |
| | NVFSCSVMHE ALHNHYTQKS LSLSLG | |
| GGGGSGGG | (SEQ ID NO: 166) | IgG4 (IL-12 p35) |
| GSGGGGSRV | RNLPVATPDP GMFPCLHHSQ NLLRAVSNML | Heterodimerization |
| ESKYGPPCPP | QKARQTLEFY PCTSEEIDHE DITKDKTSTV | mutations: |
| CPAPEFLGG | EACLPLELTK NESSLNSRET SFITNGSCLA | Q347R/D399V/F405T |
| (SEQ ID | SRKTSFMMAL CLSSIYEDLK MYQVEFKTMN | p35 substitutions: |
| NO: 3) | AKLLMDPKRQ IFLDQNMLAV IDELMQALNF | C74S V185C |
| | NSETVPQKSS LEEPDFYKTK IKLCILLHAF | Substitution for |
| | RIRACTIDRV MSYLNASGGG GSGGGGSGGG | preventing Fab-arm |
| | GSRVESKYGP PCPPCPAPEF LGGPSVFLFP | exchange and |
| | PKPKDTLMIS RTPEVTCVVV DVSQEDPEVQ | improving |
| | FNWYVDGVEV HNAKTKPREE QFNSTYRVVS | thermostability: S228P |
| | VLTVLHQDWL NGKEYKCKVS NKGLPSSIEK | |
| | TISKAKGQPR EPRVYTLPPC QEEMTKNQVS | |
| | LTCLVKGFYP SDIAVEWESN GQPENNYKTT | |
| | PPVLVSDGSF TLYSRLTVDK SRWQEGNVFS | |
| | CSVMHEALHN HYTQKSLSLS LG | |

Construct 119-3

| | | |
|---|---|---|
| RVESKYGPP | (SEQ ID NO: 167) | IgG4 (IL-12 p40) |
| CPPCPAPEFE | IWELKKDVYV VELDWYPDAP GEMVVLTCDT | Heterodimerization |
| GG (SEQ ID | PEEDGITWTL DQSSEVLGSG KTLTIQVKEF | mutations: |
| NO: 4) | GDAGQYTCHK GGEVLSHSLL LLHKKEDGIW | K360E/R409W |
| | STDILKDQKE PKNKTFLRCE AKNYSGRFTC | p40 substitutions: |
| | WWLTTISTDL TFSVKSSRGS SDPQGVTCGA | C177S, Y292C |
| | ATLSAERVRG DNKEYEYSVE CQEDSASPAA | (native disulfide bond |
| | EESLPIEVMV DAVHKLKYEN YTSSFFIRDI | between subunits is |
| | IKPDPPKNLQ LKPLKNSRQV EVSWEYPDTW | deleted) |
| | STPHSYFSLT FCVQVQGKSK REKKDRVFTD | Substitution for |
| | KTSATVICRK NASISVRAQD RCYSSSWSEW | preventing Fab-arm |
| | ASVPCS RVES KYGPPCPPCP APEFEGGPSV | exchange and |
| | FLFPPKPKDT LMISRTPEVT CVVVDVSQED | improving |
| | PEVQFNWYVD GVEVHNAKTK PREEQFNSTY | thermostability: S228P |
| | RVVSVLTVLH QDWLNGKEYK CKVSNKGLPS | Substitutions for |
| | SIEKTISKAK GQPREPQVCT LPPSQEEMTE | reducing FcγR binding: |
| | NQVSLTCLVK GFYPSDIAVE WESNGQPENN | S228P and L235E |
| | YKTTPPVLDS DGSFFLYSWL TVDKSRWQEG | |
| | NVFSCSVMHE ALHNHYTQKS LSLSLG | |
| GGGGSGGG | (SEQ ID NO: 168) | IgG4 (IL-12 p35) |
| GSGGGGSRV | RNLPVATPDP GMFPCLHHSQ NLLRAVSNML | Heterodimerization |
| ESKYGPPCPP | QKARQTLEFY PCTSEEIDHE DITKDKTSTV | mutations: |
| CPAPEFEGG | EACLPLELTK NESSLNSRET SFITNGSCLA | Q347R/D399V/F405T |
| (SEQ ID | SRKTSFMMAL CLSSIYEDLK MYQVEFKTMN | p35 substitutions: |
| NO: 5) | AKLLMDPKRQ IFLDQNMLAV IDELMQALNF | C74S V185C |
| | NSETVPQKSS LEEPDFYKTK IKLCILLHAF | Substitution for |
| | RIRACTIDRV MSYLNASGGG GSGGGGSGGG | preventing Fab-arm |
| | GSRVESKYGP PCPPCPAPEF EGGPSVFLFP | exchange and |
| | PKPKDTLMIS RTPEVTCVVV DVSQEDPEVQ | improving |
| | FNWYVDGVEV HNAKTKPREE QFNSTYRVVS | thermostability: S228P |
| | VLTVLHQDWL NGKEYKCKVS NKGLPSSIEK | Substitutions for |
| | TISKAKGQPR EPRVYTLPPC QEEMTKNQVS | reducing FcγR binding: |
| | LTCLVKGFYP SDIAVEWESN GQPENNYKTT | S228P and L235E |
| | PPVLVSDGSF TLYSRLTVDK SRWQEGNVFS | |
| | CSVMHEALHN HYTQKSLSLS LG | |

Construct 119-4

| | | |
|---|---|---|
| RVESKYGPP | (SEQ ID NO: 169) | IgG4 (IL-12 p40) |
| CPPCPAPEFE | IWELKKDVYV VELDWYPDAP GEMVVLTCDT | Heterodimerization |
| GG (SEQ ID | PEEDGITWTL DQSSEVLGSG KTLTIQVKEF | mutations: |
| NO: 4) | GDAGQYTCHK GGEVLSHSLL LLHKKEDGIW | K360E/R409W |
| | STDILKDQKE PKNKTFLRCE AKNYSGRFTC | p40 substitutions: |
| | WWLTTISTDL TFSVKSSRGS SDPQGVTCGA | C177S, Y292C |
| | ATLSAERVRG DNKEYEYSVE CQEDSASPAA | (native disulfide bond |
| | EESLPIEVMV DAVHKLKYEN YTSSFFIRDI | between subunits is |
| | IKPDPPKNLQ LKPLKNSRQV EVSWEYPDTW | deleted) |
| | STPHSYFSLT FCVQVQGKSK REKKDRVFTD | Substitution for |
| | KTSATVICRK NASISVRAQD RCYSSSWSEW | preventing Fab-arm |
| | ASVPCSRVES KYGPPCPPCP APEFEGGPSV | exchange and |
| | FLFPPKPKDT LMISRTPEVT CVVVDVSQED | improving |
| | PEVQFNWYVD GVEVHNAKTK PREEQFNSTY | thermostability: S228P |
| | RVVSVLTVLH QDWLNGKEYK CKVSNKGLAS | Substitutions for |
| | SIEKTISKAK GQPREPQVCT LPPSQEEMTE | reducing FcγR binding: |
| | NQVSLTCLVK GFYPSDIAVE WESNGQPENN | S228P, L235E, P329A |
| | YKTTPPVLDS DGSFFLYSWL TVDKSRWQEG | |
| | NVFSCSVMHE ALHNHYTQKS LSLSLG | |
| GGGGSGGG | (SEQ ID NO: 170) | IgG4 (IL-12 p35) |
| GSGGGGSRV | RNLPVATPDP GMFPCLHHSQ NLLRAVSNML | Heterodimerization |
| ESKYGPPCPP | QKARQTLEFY PCTSEEIDHE DITKDKTSTV | mutations: |
| CPAPEFEGG | EACLPLELTK NESSLNSRET SFITNGSCLA | Q347R/D399V/F405T |
| (SEQ ID | SRKTSFMMAL CLSSIYEDLK MYQVEFKTMN | p35 substitutions: C74S |
| NO: 5) | AKLLMDPKRQ IFLDQNMLAV IDELMQALNF | V185C |
| | NSETVPQKSS LEEPDFYKTK IKLCILLHAF | Substitution for |
| | RIRACTIDRV MSYLNASGGG GSGGGGSGGG | preventing Fab-arm |
| | GSRVESKYGP PCPPCPAPEF EGGPSVFLFP | exchange and |
| | PKPKDTLMIS RTPEVTCVVV DVSQEDPEVQ | improving |
| | FNWYVDGVEV HNAKTKPREE QFNSTYRVVS | thermostability: S228P |
| | VLTVLHQDWL NGKEYKCKVS NKGLASSIEK | Substitutions for |
| | TISKAKGQPR EPRVYTLPPC QEEMTKNQVS | reducing FcγR binding: |
| | LTCLVKGFYP SDIAVEWESN GQPENNYKTT | S228P, L235E, P329A |
| | PPVLVSDGSF TLYSRLTVDK SRWQEGNVFS | |
| | CSVMHEALHN HYTQKSLSLS LG | |

Construct 119-5

| | | |
|---|---|---|
| EPKSSDKTH | (SEQ ID NO: 171) | IgG1 (IL-12 p40) |
| TCPPCPAPEL | IWELKKDVYV VELDWYPDAP GEMVVLTCDT | Heterodimerization |
| LGG (SEQ ID | PEEDGITWTL DQSSEVLGSG KTLTIQVKEF | mutations: |
| NO: 7) | GDAGQYTCHK GGEVLSHSLL LLHKKEDGIW | K360E/K409W |
| OR | STDILKDQKE PKNKTFLRCE AKNYSGRFTC | p40 substitutions: |
| PKSSDKTHT | WWLTTISTDL TFSVKSSRGS SDPQGVTCGA | C177S, Y292C |
| CPPCPAPELL | ATLSAERVRG DNKEYEYSVE CQEDSASPAA | (native disulfide bond |
| GG (SEQ ID | EESLPIEVMV DAVHKLKYEN YTSSFFIRDI | between subunits is |
| NO: 238) | IKPDPPKNLQ LKPLKNSRQV EVSWEYPDTW | deleted) |
| | STPHSYFSLT FCVQVQGKSK REKKDRVFTD | C220 in the upper hinge |
| | KTSATVICRK NASISVRAQD RCYSSSWSEW | is mutated to S |
| | ASVPCSEPKS SDKTHTCPPC PAPELLGGPS | |
| | VFLFPPKPKD TLMISRTPEV TCVVVDVSHE | |
| | DPEVKFNWYV DGVEVHNAKT KPREEQYNST | |
| | YRVVSVLTVL HQDWLNGKEY KCKVSNKALP | |
| | APIEKTISKA KGQPREPQVC TLPPSRDELT | |
| | ENQVSLTCLV KGFYPSDIAV EWESNGQPEN | |
| | NYKTTPPVLD SDGSFFLYSWLTVDKSRWQQ | |
| | GNVFSCSVMH EALHNHYTQK SLSLSPG | |
| | OR | |
| | (SEQ ID NO: 269) | |
| | IWELKKDVYV VELDWYPDAP GEMVVLTCDT | |
| | PEEDGITWTL DQSSEVLGSG KTLTIQVKEF | |
| | GDAGQYTCHK GGEVLSHSLL LLHKKEDGIW | |
| | STDILKDQKE PKNKTFLRCE AKNYSGRFTC | |
| | WWLTTISTDL TFSVKSSRGS SDPQGVTCGA | |
| | ATLSAERVRG DNKEYEYSVE CQEDSASPAA | |
| | EESLPIEVMV DAVHKLKYEN YTSSFFIRDI | |
| | IKPDPPKNLQ LKPLKNSRQV EVSWEYPDTW | |
| | STPHSYFSLT FCVQVQGKSK REKKDRVFTD | |
| | KTSATVICRK NASISVRAQD RCYSSSWSEW | |
| | ASVPCSPKS SDKTHTCPPC PAPELLGGPS | |
| | VFLFPPKPKD TLMISRTPEV TCVVVDVSHE | |
| | DPEVKFNWYV DGVEVHNAKT KPREEQYNST | |
| | YRVVSVLTVL HQDWLNGKEY KCKVSNKALP | |
| | APIEKTISKA KGQPREPQVC TLPPSRDELT | |
| | ENQVSLTCLV KGFYPSDIAV EWESNGQPEN | |
| | NYKTTPPVLD SDGSFFLYSWLTVDKSRWQQ | |
| | GNVFSCSVMH EALHNHYTQK SLSLSPG | |
| GGGGSGGG | (SEQ ID NO: 172) | IgG1 (IL-12 p35) |
| GSGGGGSEP | RNLPVATPDP GMFPCLHHSQ NLLRAVSNML | Heterodimerization |
| KSSDKTHTC | QKARQTLEFY PCTSEEIDHE DITKDKTSTV | mutations: |
| PPCPAPELLG | EACLPLELTK NESSLNSRET SFITNGSCLA | Q347R, D399V/F405T |
| G (SEQ ID | SRKTSFMMAL CLSSIYEDLK MYQVEFKTMN | p35 substitutions: C74S |
| NO: 8) | AKLLMDPKRQ IFLDQNMLAV IDELMQALNF | V185C |
| | NSETVPQKSS LEEPDFYKTK IKLCILLHAF | C220 in the upper hinge |
| | RIRACTIDRV MSYLNASGGG GSGGGGSGGG | is mutated to S |
| | GSEPKSSDKT HTCPPCPAPE LLGGPSVFLF | |
| | PPKPKDTLMI SRTPEVTCVV VDVSHEDPEV | |
| | KFNWYVDGVE VHNAKTKPRE EQYNSTYRVV | |
| | SVLTVLHQDW LNGKEYKCKV SNKALPAPIE | |
| | KTISKAKGQP REPRVYTLPPCRDELTKNQV | |
| | SLTCLVKGFY PSDIAVEWES NGQPENNYKT | |
| | TPPVLVSDGSFTLYSKLTVD KSRWQQGNVF | |
| | SCSVMHEALH NHYTQKSLSL SPG | |

Construct 119-6

| | | |
|---|---|---|
| EPKSSDKTH | (SEQ ID NO: 173) | IgG1 (IL-12 p40) |
| TCPPCPAPEA | IWELKKDVYV VELDWYPDAP GEMVVLTCDT | Heterodimerization |
| AGG | PEEDGITWTL DQSSEVLGSG KTLTIQVKEF | mutations: |
| (SEQ ID | GDAGQYTCHK GGEVLSHSLL LLHKKEDGIW | K360E/K409W |
| NO: 9) | STDILKDQKE PKNKTFLRCE AKNYSGRFTC | p40 substitutions: |
| OR | WWLTTISTDL TFSVKSSRGS SDPQGVTCGA | C177S, Y292C |
| PKSSDKTHT | ATLSAERVRG DNKEYEYSVE CQEDSASPAA | (native disulfide bond |
| CPPCPAPEA | EESLPIEVMV DAVHKLKYEN YTSSFFIRDI | between subunits is |
| AGG (SEQ ID | IKPDPPKNLQ LKPLKNSRQV EVSWEYPDTW | deleted) |
| NO: 239) | STPHSYFSLT FCVQVQGKSK REKKDRVFTD | Substitutions for |
| | KTSATVICRK NASISVRAQD RCYSSSWSEW | reducing FcγR binding: |
| | ASVPCSEPKS SDKTHTCPPC PAPEAAGGPS | L234A, L235A |
| | VFLFPPKPKD TLMISRTPEV TCVVVDVSHE | C220 in the upper hinge |
| | DPEVKFNWYV DGVEVHNAKT KPREEQYNST | is mutated to S |
| | YRVVSVLTVLHQDWLNGKEY KCKVSNKALP | |
| | APIEKTISKAKGQPREPQVCTLPPSRDELTENQ | |
| | VSLTCLV KGFYPSDIAV EWESNGQPEN | |
| | NYKTTPPVLD SDGSFFLYSWLTVDKSRWQQ | |
| | GNVFSCSVMH EALHNHYTQK SLSLSPG | |
| | OR | |
| | (SEQ ID NO: 270) | |
| | IWELKKDVYV VELDWYPDAP GEMVVLTCDT | |
| | PEEDGITWTL DQSSEVLGSG KTLTIQVKEF | |
| | GDAGQYTCHK GGEVLSHSLL LLHKKEDGIW | |
| | STDILKDQKE PKNKTFLRCE AKNYSGRFTC | |
| | WWLTTISTDL TFSVKSSRGS SDPQGVTCGA | |
| | ATLSAERVRG DNKEYEYSVE CQEDSASPAA | |
| | EESLPIEVMV DAVHKLKYEN YTSSFFIRDI | |
| | IKPDPPKNLQ LKPLKNSRQV EVSWEYPDTW | |
| | STPHSYFSLT FCVQVQGKSK REKKDRVFTD | |
| | KTSATVICRK NASISVRAQD RCYSSSWSEW | |
| | ASVPCSPKS SDKTHTCPPC PAPEAAGGPS | |
| | VFLFPPKPKD TLMISRTPEV TCVVVDVSHE | |
| | DPEVKFNWYV DGVEVHNAKT KPREEQYNST | |
| | YRVVSVLTVLHQDWLNGKEY KCKVSNKALP | |
| | APIEKTISKAKGQPREPQVCTLPPSRDELTENQ | |
| | VSLTCLV KGFYPSDIAV EWESNGQPEN | |
| | NYKTTPPVLD SDGSFFLYSWLTVDKSRWQQ | |
| | GNVFSCSVMH EALHNHYTQK SLSLSPG | |
| GGGGSGGG | (SEQ ID NO: 174) | IgG1 (IL-12 p35) |
| GSGGGGSEP | RNLPVATPDP GMFPCLHHSQ NLLRAVSNML | Heterodimerization |
| KSSDKTHTC | QKARQTLEFY PCTSEEIDHE DITKDKTSTV | mutations: |
| PPCPAPEAA | EACLPLELTK NESSLNSRET SFITNGSCLA | Q347RD399V/F405T |
| GG (SEQ ID | SRKTSFMMAL CLSSIYEDLK MYQVEFKTMN | p35 substitutions: C74S |
| NO: 10) | AKLLMDPKRQ IFLDQNMLAV IDELMQALNF | V185C |
| | NSETVPQKSS LEEPDFYKTK IKLCILLHAF | Substitutions for |
| | RIRACTIDRV MSYLNASGGG GSGGGGSGGG | reducing FcγR binding: |
| | GSEPKSSDKT HTCPPCPAPE AAGGPSVFLF | L234A, L235A |
| | PPKPKDTLMI SRTPEVTCVV VDVSHEDPEV | C220 in the upper hinge |
| | KFNWYVDGVE VHNAKTKPRE EQYNSTYRVV | is mutated to S |
| | SVLTVLHQDW LNGKEYKCKV SNKALPAPIE | |
| | KTISKAKGQP REPRVYTLPPCRDELTKNQV | |
| | SLTCLVKGFY PSDIAVEWES NGQPENNYKT | |
| | TPPVLVSDGS FTLYSKLTVD KSRWQQGNVF | |
| | SCSVMHEALH NHYTQKSLSL SPG | |

Construct 119-7

| | | |
|---|---|---|
| EPKSSDKTH | (SEQ ID NO: 175) | IgG1 (IL-12 p40) |
| TCPPCPAPEA | IWELKKDVYV VELDWYPDAP GEMVVLTCDT | Heterodimerization |
| AGG (SEQ ID | PEEDGITWTL DQSSEVLGSG KTLTIQVKEF | mutations: |
| NO: 9) | GDAGQYTCHK GGEVLSHSLL LLHKKEDGIW | K360E/K409W |
| OR | STDILKDQKE PKNKTFLRCE AKNYSGRFTC | p40 substitutions: |
| PKSSDKTHT | WWLTTISTDL TFSVKSSRGS SDPQGVTCGA | C177S, Y292C |
| CPPCPAPEA | ATLSAERVRG DNKEYEYSVE CQEDSASPAA | (native disulfide bond |
| AGG (SEQ ID | EESLPIEVMV DAVHKLKYEN YTSSFFIRDI | between subunits is |
| NO: 239) | IKPDPPKNLQ LKPLKNSRQV EVSWEYPDTW | deleted) |
| | STPHSYFSLT FCVQVQGKSK REKKDRVFTD | Substitutions for |
| | KTSATVICRK NASISVRAQD RCYSSSWSEW | reducing FcγR binding: |
| | ASVPCSEPKS SDKTHTCPPC PAPEAAGGPS | L234A, L235A, P329A |
| | VFLFPPKPKD TLMISRTPEVTCVVVDVSHE | C220 in the upper hinge |
| | DPEVKFNWYV DGVEVHNAKT KPREEQYNST | is mutated to S |
| | YRVVSVLTVL HQDWLNGKEYKCKVSNKALA | |
| | APIEKTISKAKGQPREPQVCTLPPSRDELTENQ | |
| | VSLTCLV KGFYPSDIAV EWESNGQPEN | |
| | NYKTTPPVLD SDGSFFLYSWLTVDKSRWQQ | |
| | GNVFSCSVMH EALHNHYTQK SLSLSPG | |
| | OR | |
| | (SEQ ID NO: 271) | |
| | IWELKKDVYV VELDWYPDAP GEMVVLTCDT | |
| | PEEDGITWTL DQSSEVLGSG KTLTIQVKEF | |
| | GDAGQYTCHK GGEVLSHSLL LLHKKEDGIW | |
| | STDILKDQKE PKNKTFLRCE AKNYSGRFTC | |
| | WWLTTISTDL TFSVKSSRGS SDPQGVTCGA | |
| | ATLSAERVRG DNKEYEYSVE CQEDSASPAA | |
| | EESLPIEVMV DAVHKLKYEN YTSSFFIRDI | |
| | IKPDPPKNLQ LKPLKNSRQV EVSWEYPDTW | |
| | STPHSYFSLT FCVQVQGKSK REKKDRVFTD | |
| | KTSATVICRK NASISVRAQD RCYSSSWSEW | |
| | ASVPCSPKS SDKTHTCPPC PAPEAAGGPS | |
| | VFLFPPKPKD TLMISRTPEVTCVVVDVSHE | |
| | DPEVKFNWYV DGVEVHNAKT KPREEQYNST | |
| | YRVVSVLTVL HQDWLNGKEYKCKVSNKALA | |
| | APIEKTISKAKGQPREPQVCTLPPSRDELTENQ | |
| | VSLTCLV KGFYPSDIAV EWESNGQPEN | |
| | NYKTTPPVLD SDGSFFLYSWLTVDKSRWQQ | |
| | GNVFSCSVMH EALHNHYTQK SLSLSPG | |
| GGGGSGGG | (SEQ ID NO: 176) | IgG1 (IL-12 p35) |
| GSGGGGSEP | RNLPVATPDP GMFPCLHHSQ NLLRAVSNML | Heterodimerization |
| KSSDKTHTC | QKARQTLEFY PCTSEEIDHE DITKDKTSTV | mutations: |
| PPCPAPEAA | EACLPLELTK NESSLNSRET SFITNGSCLA | Q347RD399V/F405T |
| GG (SEQ ID | SRKTSFMMAL CLSSIYEDLK MYQVEFKTMN | p35 substitutions: |
| NO: 10) | AKLLMDPKRQ IFLDQNMLAV IDELMQALNF | C74S, V185C |
| | NSETVPQKSS LEEPDFYKTK IKLCILLHAF | Substitutions for |
| | RIRACTIDRV MSYLNASGGG GSGGGGSGGG | reducing FcγR binding: |
| | GSEPKSSDKT HTCPPCPAPE AAGGPSVFLF | L234A, L235A, P329A |
| | PPKPKDTLMISRTPEVTCVV VDVSHEDPEV | C220 in the upper hinge |
| | KFNWYVDGVE VHNAKTKPRE EQYNSTYRVV | is mutated to S |
| | SVLTVLHQDW LNGKEYKCKV SNKALAAPIE | |
| | KTISKAKGQP REPRVYTLPP CRDELTKNQV | |
| | SLTCLVKGFY PSDIAVEWES NGQPENNYKT | |
| | TPPVLVSDGS FTLYSKLTVD KSRWQQGNVF | |
| | SCSVMHEALH NHYTQKSLSL SPG | |

Construct 119-8

| | | |
|---|---|---|
| EPKSSDKTH | (SEQ ID NO: 177) | IgG1 (IL-12 p40) |
| TCPPCPAPEA | IWELKKDVYV VELDWYPDAP GEMVVLTCDT | Heterodimerization |
| EGA (SEQ ID | PEEDGITWTL DQSSEVLGSG KTLTIQVKEF | mutations: |
| NO: 11) | GDAGQYTCHK GGEVLSHSLL LLHKKEDGIW | K360E/K409W |
| OR | STDILKDQKE PKNKTFLRCE AKNYSGRFTC | p40 substitutions: |
| PKSSDKTHT | WWLTTISTDL TFSVKSSRGS SDPQGVTCGA | C177S, Y292C |
| CPPCPAPEAE | ATLSAERVRG DNKEYEYSVE CQEDSASPAA | (native disulfide bond |
| GA (SEQ ID | EESLPIEVMV DAVHKLKYEN YTSSFFIRDI | between subunits is |
| NO: 240) | IKPDPPKNLQ LKPLKNSRQV EVSWEYPDTW | deleted) |
| | STPHSYFSLT FCVQVQGKSK REKKDRVFTD | Substitutions for |
| | KTSATVICRK NASISVRAQD RCYSSSWSEW | reducing FcγR and C1q |
| | ASVPCSEPKS SDKTHTCPPC PAPEAEGAPS | binding: L234A, |
| | VFLFPPKPKD TLMISRTPEV TCVVVDVSHE | L235E, G237A, |
| | DPEVKFNWYV DGVEVHNAKT KPREEQYNST | A330S, P331S |
| | YRVVSVLTVL HQDWLNGKEY KCKVSNKALP | C220 in the upper hinge |
| | SSIEKTISKAKGQPREPQVCTLPPSRDELTENQ | is mutated to S |
| | VSLTCLV KGFYPSDIAV EWESNGQPEN | |
| | NYKTTPPVLD SDGSFFLYSWLTVDKSRWQQ | |
| | GNVFSCSVMH EALHNHYTQK SLSLSPG | |
| | OR | |
| | (SEQ ID NO: 272) | |
| | IWELKKDVYV VELDWYPDAP GEMVVLTCDT | |
| | PEEDGITWTL DQSSEVLGSG KTLTIQVKEF | |
| | GDAGQYTCHK GGEVLSHSLL LLHKKEDGIW | |
| | STDILKDQKE PKNKTFLRCE AKNYSGRFTC | |
| | WWLTTISTDL TFSVKSSRGS SDPQGVTCGA | |
| | ATLSAERVRG DNKEYEYSVE CQEDSASPAA | |
| | EESLPIEVMV DAVHKLKYEN YTSSFFIRDI | |
| | IKPDPPKNLQ LKPLKNSRQV EVSWEYPDTW | |
| | STPHSYFSLT FCVQVQGKSK REKKDRVFTD | |
| | KTSATVICRK NASISVRAQD RCYSSSWSEW | |
| | ASVPCSPKS SDKTHTCPPC PAPEAEGAPS | |
| | VFLFPPKPKD TLMISRTPEV TCVVVDVSHE | |
| | DPEVKFNWYV DGVEVHNAKT KPREEQYNST | |
| | YRVVSVLTVL HQDWLNGKEY KCKVSNKALP | |
| | SSIEKTISKAKGQPREPQVCTLPPSRDELTENQ | |
| | VSLTCLV KGFYPSDIAV EWESNGQPEN | |
| | NYKTTPPVLD SDGSFFLYSWLTVDKSRWQQ | |
| | GNVFSCSVMH EALHNHYTQK SLSLSPG | |
| GGGGSGGG | (SEQ ID NO: 178) | IgG1 (IL-12 p35) |
| GSGGGGSEP | RNLPVATPDP GMFPCLHHSQ NLLRAVSNML | Heterodimerization |
| KSSDKTHTC | QKARQTLEFY PCTSEEIDHE DITKDKTSTV | mutations: |
| PPCPAPEAE | EACLPLELTK NESSLNSRET SFITNGSCLA | Q347R/D399V/F405T |
| GA | SRKTSFMMAL CLSSIYEDLK MYQVEFKTMN | p35 substitutions: |
| (SEQ ID | AKLLMDPKRQ IFLDQNMLAV IDELMQALNF | C74S, V185C |
| NO: 12) | NSETVPQKSS LEEPDFYKTK IKLCILLHAF | Substitutions for |
| | RIRACTIDRV MSYLNASGGG GSGGGGSGGG | reducing FcγR and C1q |
| | GSEPKSSDKT HTCPPCPAPE AEGAPSVFLF | binding: L234A, |
| | PPKPKDTLMISRTPEVTCVV VDVSHEDPEV | L235E, G237A, |
| | KFNWYVDGVE VHNAKTKPRE EQYNSTYRVV | A330S, P331S |
| | SVLTVLHQDW LNGKEYKCKV SNKALPSSIE | C220 in the upper hinge |
| | KTISKAKGQP REPRVYTLPP CRDELTKNQV | is mutated to S |
| | SLTCLVKGFY PSDIAVEWES NGQPENNYKT | |
| | TPPVLVSDGS FTLYSKLTVD KSRWQQGNVF | |
| | SCSVMHEALH NHYTQKSLSL SPG | |

Construct 120

| | | |
|---|---|---|
| RVESKYGPP | (SEQ ID NO: 179) | IgG4 (IL-12 p40) |
| CPPCPAPEFL | IWELKKDVYV VELDWYPDAP GEMVVLTCDT | Heterodimerization |
| GG (SEQ ID | PEEDGITWTL DQSSEVLGSG KTLTIQVKEF | mutations: |
| NO: 2) | GDAGQYTCHK GGEVLSHSLL LLHKKEDGIW | K370E/R409W |
| | STDILKDQKE PKNKTFLRCE AKNYSGRFTC | p40 substitution: |
| | WWLTTISTDL TFSVKSSRGS SDPQGVTCGA | Y292C (native disulfide |
| | ATLSAERVRG DNKEYEYSVE CQEDSACPAA | bond between subunits |
| | EESLPIEVMV DAVHKLKYEN YTSSFFIRDI | is preserved) |
| | IKPDPPKNLQ LKPLKNSRQV EVSWEYPDTW | Substitution for |
| | STPHSYFSLT FCVQVQGKSK REKKDRVFTD | preventing Fab-arm |
| | KTSATVICRK NASISVRAQD RCYSSSWSEW | exchange and |
| | ASVPCSRVES KYGPPCPPCP APEFLGGPSV | improving |
| | FLFPPKPKDT LMISRTPEVT CVVVDVSQED | thermostability: S228P |
| | PEVQFNWYVD GVEVHNAKTK PREEQFNSTY | |
| | RVVSVLTVLH QDWLNGKEYK CKVSNKGLPS | |
| | SIEKTISKAK GQPREPQVCT LPPSQEEMTK | |
| | NQVSLTCLVE GFYPSDIAVE WESNGQPENN | |
| | YKTTPPVLDS DGSFFLYSWL TVDKSRWQEG | |
| | NVFSCSVMHE ALHNHYTQKS LSLSLG | |
| GGGGSGGG | (SEQ ID NO: 180) | IgG4 (IL-12 p35) |
| GSGGGGSRV | RNLPVATPDP GMFPCLHHSQ NLLRAVSNML | Heterodimerization |
| ESKYGPPCPP | QKARQTLEFY PCTSEEIDHE DITKDKTSTV | mutations: |
| CPAPEFLGG | EACLPLELTK NESCLNSRET SFITNGSCLA | E357N/D399V/F405T |
| (SEQ ID | SRKTSFMMAL CLSSIYEDLK MYQVEFKTMN | p35 substitution: |
| NO: 3) | AKLLMDPKRQ IFLDQNMLAV IDELMQALNF | V185C (native disulfide |
| | NSETVPQKSS LEEPDFYKTK IKLCILLHAF | bond between subunits |
| | RIRACTIDRV MSYLNASGGG GSGGGGSGGG | is preserved) |
| | GSRVESKYGP PCPPCPAPEF LGGPSVFLFP | Substitution for |
| | PKPKDTLMIS RTPEVTCVVV DVSQEDPEVQ | preventing Fab-arm |
| | FNWYVDGVEV HNAKTKPREE QFNSTYRVVS | exchange and |
| | VLTVLHQDWL NGKEYKCKVS NKGLPSSIEK | improving |
| | TISKAKGQPR EPQVYTLPPCQENMTKNQVS | thermostability: S228P |
| | LTCLVKGFYP SDIAVEWESN GQPENNYKTT | |
| | PPVLVSDGSF TLYSRLTVDK SRWQEGNVFS | |
| | CSVMHEALHN HYTQKSLSLS LG | |

Construct 120-1

| | | |
|---|---|---|
| RVESKYGPP | (SEQ ID NO: 181) | IgG4 (IL-12 p40) |
| CPPCPAPEFL | IWELKKDVYV VELDWYPDAP GEMVVLTCDT | Heterodimerization |
| GG (SEQ ID | PEEDGITWTL DQSSEVLGSG KTLTIQVKEF | mutations: |
| NO: 2) | GDAGQYTCHK GGEVLSHSLL LLHKKEDGIW | K360E/R409W |
| | STDILKDQKE PKNKTFLRCE AKNYSGRFTC | p40 substitution: |
| | WWLTTISTDL TFSVKSSRGS SDPQGVTCGA | Y292C (native disulfide |
| | ATLSAERVRG DNKEYEYSVE CQEDSACPAA | bond between subunits |
| | EESLPIEVMV DAVHKLKYEN YTSSFFIRDI | is preserved) |
| | IKPDPPKNLQ LKPLKNSRQV EVSWEYPDTW | Substitution for |
| | STPHSYFSLT FCVQVQGKSK REKKDRVFTD | preventing Fab-arm |
| | KTSATVICRK NASISVRAQD RCYSSSWSEW | exchange and |
| | ASVPCSRVES KYGPPCPPCP APEFLGGPSV | improving |
| | FLFPPKPKDT LMISRTPEVT CVVVDVSQED | thermostability: S228P |
| | PEVQFNWYVD GVEVHNAKTK PREEQFNSTY | |
| | RVVSVLTVLH QDWLNGKEYK CKVSNKGLPS | |
| | SIEKTISKAK GQPREPQVCT LPPSQEEMTE | |
| | NQVSLTCLVK GFYPSDIAVE WESNGQPENN | |
| | YKTTPPVLDS DGSFFLYSWL TVDKSRWQEG | |
| | NVFSCSVMHE ALHNHYTQKS LSLSLG | |
| GGGGSGGG | (SEQ ID NO: 182) | IgG4 (IL-12 p35) |
| GSGGGGSRV | RNLPVATPDP GMFPCLHHSQ NLLRAVSNML | Heterodimerization |
| ESKYGPPCPP | QKARQTLEFY PCTSEEIDHE DITKDKTSTV | mutations: |
| CPAPEFLGG | EACLPLELTK NESCLNSRET SFITNGSCLA | Q347RD399V/F405T |
| (SEQ ID | SRKTSFMMAL CLSSIYEDLK MYQVEFKTMN | p35 substitution: |
| NO: 3) | AKLLMDPKRQ IFLDQNMLAV IDELMQALNF | V185C (native disulfide |
| | NSETVPQKSS LEEPDFYKTK IKLCILLHAF | bond between subunits |
| | RIRACTIDRV MSYLNASGGG GSGGGGSGGG | is preserved) |
| | GSRVESKYGP PCPPCPAPEF LGGPSVFLFP | Substitution for |
| | PKPKDTLMIS RTPEVTCVVV DVSQEDPEVQ | preventing Fab-arm |
| | FNWYVDGVEV HNAKTKPREE QFNSTYRVVS | exchange and |
| | VLTVLHQDWL NGKEYKCKVS NKGLPSSIEK | improving |
| | TISKAKGQPR EPRVYTLPPCQEEMTKNQVS | thermostability: S228P |
| | LTCLVKGFYP SDIAVEWESN GQPENNYKTT | |
| | PPVLVSDGSF TLYSRLTVDK SRWQEGNVFS | |
| | CSVMHEALHN HYTQKSLSLS LG | |

Construct 120-2

| | | |
|---|---|---|
| RVESKYGPP | (SEQ ID NO: 183) | IgG4 (IL-12 p40) |
| CPPCPAPEFE | IWELKKDVYV VELDWYPDAP GEMVVLTCDT | Heterodimerization |
| GG (SEQ ID | PEEDGITWTL DQSSEVLGSG KTLTIQVKEF | mutations: |
| NO: 4) | GDAGQYTCHK GGEVLSHSLL LLHKKEDGIW | K360E/R409W |
| | STDILKDQKE PKNKTFLRCE AKNYSGRFTC | p40 substitution: |
| | WWLTTISTDL TFSVKSSRGS SDPQGVTCGA | Y292C (native disulfide |
| | ATLSAERVRG DNKEYEYSVE CQEDSACPAA | bond between subunits |
| | EESLPIEVMV DAVHKLKYEN YTSSFFIRDI | is preserved) |
| | IKPDPPKNLQ LKPLKNSRQV EVSWEYPDTW | Substitution for |
| | STPHSYFSLT FCVQVQGKSK REKKDRVFTD | preventing Fab-arm |
| | KTSATVICRK NASISVRAQD RCYSSSWSEW | exchange and |
| | ASVPCSRVES KYGPPCPPCP APEFEGGPSV | improving |
| | FLFPPKPKDT LMISRTPEVT CVVVDVSQED | thermostability: S228P |
| | PEVQFNWYVD GVEVHNAKTK PREEQFNSTY | Substitutions for |
| | RVVSVLTVLH QDWLNGKEYK CKVSNKGLPS | reducing FcγR binding: |
| | SIEKTISKAK GQPREPQVCT LPPSQEEMTE | S228P and L235E |
| | NQVSLTCLVK GFYPSDIAVE WESNGQPENN | |
| | YKTTPPVLDS DGSFFLYSWL TVDKSRWQEG | |
| | NVFSCSVMHE ALHNHYTQKS LSLSLG | |
| GGGGSGGG | (SEQ ID NO: 184) | IgG4 (IL-12 p35) |
| GSGGGGSRV | RNLPVATPDP GMFPCLHHSQ NLLRAVSNML | Heterodimerization |
| ESKYGPPCPP | QKARQTLEFY PCTSEEIDHE DITKDKTSTV | mutations: |
| CPAPEFEGG | EACLPLELTK NESCLNSRET SFITNGSCLA | Q347R/D399V/F405T |
| (SEQ ID | SRKTSFMMAL CLSSIYEDLK MYQVEFKTMN | p35 substitution: |
| NO: 5) | AKLLMDPKRQ IFLDQNMLAV IDELMQALNF | V185C (native disulfide |
| | NSETVPQKSS LEEPDFYKTK IKLCILLHAF | bond between subunits |
| | RIRACTIDRV MSYLNASGGG GSGGGGSGGG | is preserved) |
| | GSRVESKYGP PCPPCPAPEF EGGPSVFLFP | Substitution for |
| | PKPKDTLMIS RTPEVTCVVV DVSQEDPEVQ | preventing Fab-arm |
| | FNWYVDGVEV HNAKTKPREE QFNSTYRVVS | exchange and |
| | VLTVLHQDWL NGKEYKCKVS NKGLPSSIEK | improving |
| | TISKAKGQPR EPRVYTLPPC QEEMTKNQVS | thermostability: S228P |
| | LTCLVKGFYP SDIAVEWESN GQPENNYKTT | Substitutions for |
| | PPVLVSDGSF TLYSRLTVDK SRWQEGNVFS | reducing FcγR binding: |
| | CSVMHEALHN HYTQKSLSLS LG | S228P and L235E |

Construct 120-3

| | | |
|---|---|---|
| RVESKYGPP | (SEQ ID NO: 185) | IgG4 (IL-12 p40) |
| CPPCPAPEFE | IWELKKDVYV VELDWYPDAP GEMVVLTCDT | Heterodimerization |
| GG (SEQ ID | PEEDGITWTL DQSSEVLGSG KTLTIQVKEF | mutations: |
| NO: 4) | GDAGQYTCHK GGEVLSHSLL LLHKKEDGIW | K360E/R409W |
| | STDILKDQKE PKNKTFLRCE AKNYSGRFTC | p40 substitution: |
| | WWLTTISTDL TFSVKSSRGS SDPQGVTCGA | Y292C (native disulfide |
| | ATLSAERVRG DNKEYEYSVE CQEDSACPAA | bond between subunits |
| | EESLPIEVMV DAVHKLKYEN YTSSFFIRDI | is preserved) |
| | IKPDPPKNLQ LKPLKNSRQV EVSWEYPDTW | Substitution for |
| | STPHSYFSLT FCVQVQGKSK REKKDRVFTD | preventing Fab-arm |
| | KTSATVICRK NASISVRAQD RCYSSSWSEW | exchange and |
| | ASVPCSRVES KYGPPCPPCP APEFEGGPSV | improving |
| | FLFPPKPKDT LMISRTPEVT CVVVDVSQED | thermostability: S228P |
| | PEVQFNWYVD GVEVHNAKTK PREEQFNSTY | Substitutions for |
| | RVVSVLTVLH QDWLNGKEYK CKVSNKGLAS | reducing FcγR binding: |
| | SIEKTISKAK GQPREPQVCT LPPSQEEMTE | S228P, L235E, P329A |
| | NQVSLTCLVK GFYPSDIAVE WESNGQPENN | |
| | YKTTPPVLDS DGSFFLYSWL TVDKSRWQEG | |
| | NVFSCSVMHE ALHNHYTQKS LSLSLG | |
| GGGGSGGG | (SEQ ID NO: 186) | IgG4 (IL-12 p35) |
| GSGGGGSRV | RNLPVATPDP GMFPCLHHSQ NLLRAVSNML | Heterodimerization |
| ESKYGPPCPP | QKARQTLEFY PCTSEEIDHE DITKDKTSTV | mutations: |
| CPAPEFEGG | EACLPLELTK NESCLNSRET SFITNGSCLA | Q347R/D399V/F405T |
| (SEQ ID | SRKTSFMMAL CLSSIYEDLK MYQVEFKTMN | p35 substitution: |
| NO: 5) | AKLLMDPKRQ IFLDQNMLAV IDELMQALNF | V185C (native disulfide |
| | NSETVPQKSS LEEPDFYKTK IKLCILLHAF | bond between subunits |
| | RIRACTIDRV MSYLNASGGG GSGGGGSGGG | is preserved) |
| | GSRVESKYGP PCPPCPAPEF EGGPSVFLFP | Substitution for |
| | PKPKDTLMIS RTPEVTCVVV DVSQEDPEVQ | preventing Fab-arm |
| | FNWYVDGVEV HNAKTKPREE QFNSTYRVVS | exchange and |
| | VLTVLHQDWL NGKEYKCKVS NKGLASSIEK | improving |
| | TISKAKGQPR EPRVYTLPPC QEEMTKNQVS | thermostability: S228P |
| | LTCLVKGFYP SDIAVEWESN GQPENNYKTT | Substitutions for |
| | PPVLVSDGSF TLYSRLTVDK SRWQEGNVFS | reducing FcyR binding: |
| | CSVMHEALHN HYTQKSLSLS LG | S228P, L235E, P329A |

Construct 120-4

| | | |
|---|---|---|
| EPKSSDKTH | (SEQ ID NO: 187) | IgG1 (IL-12 p40) |
| TCPPCPAPEL | IWELKKDVYV VELDWYPDAP GEMVVLTCDT | Heterodimerization |
| LGG (SEQ ID | PEEDGITWTL DQSSEVLGSG KTLTIQVKEF | mutations: |
| NO: 7) | GDAGQYTCHK GGEVLSHSLL LLHKKEDGIW | K360E/K409W |
| OR | STDILKDQKE PKNKTFLRCE AKNYSGRFTC | p40 substitution: |
| PKSSDKTHT | WWLTTISTDL TFSVKSSRGS SDPQGVTCGA | Y292C (native disulfide |
| CPPCPAPELL | ATLSAERVRG DNKEYEYSVE CQEDSACPAA | bond between subunits |
| GG (SEQ ID | EESLPIEVMV DAVHKLKYEN YTSSFFIRDI | is preserved) |
| NO: 238) | IKPDPPKNLQ LKPLKNSRQV EVSWEYPDTW | C220 in the upper hinge |
| | STPHSYFSLT FCVQVQGKSK REKKDRVFTD | is mutated to S |
| | KTSATVICRK NASISVRAQD RCYSSSWSEW | |
| | ASVPCSEPKS SDKTHTCPPC PAPELLGGPS | |
| | VFLFPPKPKD TLMISRTPEV TCVVVDVSHE | |
| | DPEVKFNWYV DGVEVHNAKT KPREEQYNST | |
| | YRVVSVLTVL HQDWLNGKEY KCKVSNKALP | |
| | APIEKTISKA KGQPREPQVC TLPPSRDELT | |
| | ENQVSLTCLV KGFYPSDIAV EWESNGQPEN | |
| | NYKTTPPVLD SDGSFFLYSWLTVDKSRWQQ | |
| | GNVFSCSVMH EALHNHYTQK SLSLSPG | |
| | OR | |
| | (SEQ ID NO: 273) | |
| | IWELKKDVYV VELDWYPDAP GEMVVLTCDT | |
| | PEEDGITWTL DQSSEVLGSG KTLTIQVKEF | |
| | GDAGQYTCHK GGEVLSHSLL LLHKKEDGIW | |
| | STDILKDQKE PKNKTFLRCE AKNYSGRFTC | |
| | WWLTTISTDL TFSVKSSRGS SDPQGVTCGA | |
| | ATLSAERVRG DNKEYEYSVE CQEDSACPAA | |
| | EESLPIEVMV DAVHKLKYEN YTSSFFIRDI | |
| | IKPDPPKNLQ LKPLKNSRQV EVSWEYPDTW | |
| | STPHSYFSLT FCVQVQGKSK REKKDRVFTD | |
| | KTSATVICRK NASISVRAQD RCYSSSWSEW | |
| | ASVPCSPKS SDKTHTCPPC PAPELLGGPS | |
| | VFLFPPKPKD TLMISRTPEV TCVVVDVSHE | |
| | DPEVKFNWYV DGVEVHNAKT KPREEQYNST | |
| | YRVVSVLTVL HQDWLNGKEY KCKVSNKALP | |
| | APIEKTISKA KGQPREPQVC TLPPSRDELT | |
| | ENQVSLTCLV KGFYPSDIAV EWESNGQPEN | |
| | NYKTTPPVLD SDGSFFLYSWLTVDKSRWQQ | |
| | GNVFSCSVMH EALHNHYTQK SLSLSPG | |
| GGGGSGGG | (SEQ ID NO: 188) | IgG1 (IL-12 p35) |
| GSGGGGSEP | RNLPVATPDP GMFPCLHHSQ NLLRAVSNML | Heterodimerization |
| KSSDKTHTC | QKARQTLEFY PCTSEEIDHE DITKDKTSTV | mutations: |
| PPCPAPELLG | EACLPLELTK NESCLNSRET SFITNGSCLA | Q347R/D399V/F405T |
| G (SEQ ID | SRKTSFMMAL CLSSIYEDLK MYQVEFKTMN | Substitution for |
| NO: 8) | AKLLMDPKRQ IFLDQNMLAV IDELMQALNF | stabilizing disulfide |
| | NSETVPQKSS LEEPDFYKTK IKLCILLHAF | bond: S354C |
| | RIRACTIDRV MSYLNASGGG GSGGGGSGGG | p35 substitution: |
| | GSEPKSSDKT HTCPPCPAPE LLGGPSVFLF | V185C (native disulfide |
| | PPKPKDTLMI SRTPEVTCVV VDVSHEDPEV | bond between subunits |
| | KFNWYVDGVE VHNAKTKPRE EQYNSTYRVV | is preserved) |
| | SVLTVLHQDW LNGKEYKCKV SNKALPAPIE | C220 in the upper hinge |
| | KTISKAKGQP REPRVYTLPPCRDELTKNQV | is mutated to S |
| | SLTCLVKGFY PSDIAVEWES NGQPENNYKT | |
| | TPPVLVSDGSFTLYSKLTVD KSRWQQGNVF | |
| | SCSVMHEALH NHYTQKSLSL SPG | |

Construct 120-5

| | | |
|---|---|---|
| EPKSSDKTH | (SEQ ID NO: 189) | IgG1 (IL-12 p40) |
| TCPPCPAPEA | IWELKKDVYV VELDWYPDAP GEMVVLTCDT | Heterodimerization |
| AGG (SEQ ID | PEEDGITWTL DQSSEVLGSG KTLTIQVKEF | mutations: |
| NO: 9) | GDAGQYTCHK GGEVLSHSLL LLHKKEDGIW | K360E/K409W |
| OR | STDILKDQKE PKNKTFLRCE AKNYSGRFTC | p40 substitution: |
| PKSSDKTHT | WWLTTISTDL TFSVKSSRGS SDPQGVTCGA | Y292C (native disulfide |
| CPPCPAPEA | ATLSAERVRG DNKEYEYSVE CQEDSACPAA | bond between subunits |
| AGG (SEQ ID | EESLPIEVMV DAVHKLKYEN YTSSFFIRDI | is preserved) |
| NO: 239) | IKPDPPKNLQ LKPLKNSRQV EVSWEYPDTW | Substitutions for |
| | STPHSYFSLT FCVQVQGKSK REKKDRVFTD | reducing FcγR binding: |
| | KTSATVICRK NASISVRAQD RCYSSSWSEW | L234A, L235A |
| | ASVPCSEPKS SDKTHTCPPC PAPEAAGGPS | C220 in the upper hinge |
| | VFLFPPKPKD TLMISRTPEV TCVVVDVSHE | is mutated to S |
| | DPEVKFNWYV DGVEVHNAKT KPREEQYNST | |
| | YRVVSVLTVLHQDWLNGKEY KCKVSNKALP | |
| | APIEKTISKA KGQPREPQVC | |
| | TLPPSRDELTENQVSLTCLV KGFYPSDIAV | |
| | EWESNGQPEN NYKTTPPVLD | |
| | SDGSFFLYSWLTVDKSRWQQ GNVFSCSVMH | |
| | EALHNHYTQK SLSLSPGPKS | |
| | OR | |
| | (SEQ ID NO: 274) | |
| | IWELKKDVYV VELDWYPDAP GEMVVLTCDT | |
| | PEEDGITWTL DQSSEVLGSG KTLTIQVKEF | |
| | GDAGQYTCHK GGEVLSHSLL LLHKKEDGIW | |
| | STDILKDQKE PKNKTFLRCE AKNYSGRFTC | |
| | WWLTTISTDL TFSVKSSRGS SDPQGVTCGA | |
| | ATLSAERVRG DNKEYEYSVE CQEDSACPAA | |
| | EESLPIEVMV DAVHKLKYEN YTSSFFIRDI | |
| | IKPDPPKNLQ LKPLKNSRQV EVSWEYPDTW | |
| | STPHSYFSLT FCVQVQGKSK REKKDRVFTD | |
| | KTSATVICRK NASISVRAQD RCYSSSWSEW | |
| | ASVPCSPKS SDKTHTCPPC PAPEAAGGPS | |
| | VFLFPPKPKD TLMISRTPEV TCVVVDVSHE | |
| | DPEVKFNWYV DGVEVHNAKT KPREEQYNST | |
| | YRVVSVLTVLHQDWLNGKEY KCKVSNKALP | |
| | APIEKTISKA KGQPREPQVC | |
| | TLPPSRDELTENQVSLTCLV KGFYPSDIAV | |
| | EWESNGQPEN NYKTTPPVLD | |
| | SDGSFFLYSWLTVDKSRWQQ GNVFSCSVMH | |
| | EALHNHYTQK SLSLSPG | |
| GGGGSGGG | (SEQ ID NO: 190) | IgG1 (IL-12 p35) |
| GSGGGGSEP | RNLPVATPDP GMFPCLHHSQ NLLRAVSNML | Heterodimerization |
| KSSDKTHTC | QKARQTLEFY PCTSEEIDHE DITKDKTSTV | mutations: |
| PPCPAPEAA | EACLPLELTK NESCLNSRET SFITNGSCLA | Q347R/D399V/F405T |
| GG (SEQ ID | SRKTSFMMAL CLSSIYEDLK MYQVEFKTMN | p35 substitution: |
| NO: 10) | AKLLMDPKRQ IFLDQNMLAV IDELMQALNF | V185C (native disulfide |
| | NSETVPQKSS LEEPDFYKTK IKLCILLHAF | bond between subunits |
| | RIRACTIDRV MSYLNASGGG GSGGGGSGGG | is preserved) |
| | GSEPKSSDKT HTCPPCPAPE AAGGPSVFLF | Substitutions for |
| | PPKPKDTLMI SRTPEVTCVV VDVSHEDPEV | reducing FcγR binding: |
| | KFNWYVDGVE VHNAKTKPRE EQYNSTYRVV | L234A, L235A |
| | SVLTVLHQDW LNGKEYKCKV SNKALPAPIE | C220 in the upper hinge |
| | KTISKAKGQP REPRVYTLPPCRDELTKNQV | is mutated to S |
| | SLTCLVKGFY PSDIAVEWES NGQPENNYKT | |
| | TPPVLVSDGS FTLYSKLTVD KSRWQQGNVF | |
| | SCSVMHEALH NHYTQKSLSL SPG | |

Construct 120-6

| | | |
|---|---|---|
| EPKSSDKTH | (SEQ ID NO: 191) | IgG1 (IL-12 p40) |
| TCPPCPAPEA | IWELKKDVYV VELDWYPDAP GEMVVLTCDT | Heterodimerization |
| AGG (SEQ ID | PEEDGITWTL DQSSEVLGSG KTLTIQVKEF | mutations: |
| NO: 9) | GDAGQYTCHK GGEVLSHSLL LLHKKEDGIW | K360E/K409W |
| OR | STDILKDQKE PKNKTFLRCE AKNYSGRFTC | p40 substitution: |
| PKSSDKTHT | WWLTTISTDL TFSVKSSRGS SDPQGVTCGA | Y292C (native disulfide |
| CPPCPAPEA | ATLSAERVRG DNKEYEYSVE CQEDSACPAA | bond between subunits |
| AGG (SEQ ID | EESLPIEVMV DAVHKLKYEN YTSSFFIRDI | is preserved) |
| NO: 239) | IKPDPPKNLQ LKPLKNSRQV EVSWEYPDTW | Substitutions for |
| | STPHSYFSLT FCVQVQGKSK REKKDRVFTD | reducing FcγR binding: |
| | KTSATVICRK NASISVRAQD RCYSSSWSEW | L234A, L235A, P329A |
| | ASVPCSEPKS SDKTHTCPPC PAPEAAGGPS | C220 in the upper hinge |
| | VFLFPPKPKD TLMISRTPEVTCVVVDVSHE | is mutated to S |
| | DPEVKFNWYV DGVEVHNAKT KPREEQYNST | |
| | YRVVSVLTVLHQDWLNGKEY KCKVSNKALA | |
| | APIEKTISKAKGQPREPQVCTLPPSRDELTENQ | |
| | VSLTCLVKGFYPSDIAVEWESNGQPENNYKTT | |
| | PPVLDSDGSFFLYSWLTVDKSRWQQGNVFSCS | |
| | VMH EALHNHYTQK SLSLSPG | |
| | OR | |
| | (SEQ ID NO: 275) | |
| | IWELKKDVYV VELDWYPDAP GEMVVLTCDT | |
| | PEEDGITWTL DQSSEVLGSG KTLTIQVKEF | |
| | GDAGQYTCHK GGEVLSHSLL LLHKKEDGIW | |
| | STDILKDQKE PKNKTFLRCE AKNYSGRFTC | |
| | WWLTTISTDL TFSVKSSRGS SDPQGVTCGA | |
| | ATLSAERVRG DNKEYEYSVE CQEDSACPAA | |
| | EESLPIEVMV DAVHKLKYEN YTSSFFIRDI | |
| | IKPDPPKNLQ LKPLKNSRQV EVSWEYPDTW | |
| | STPHSYFSLT FCVQVQGKSK REKKDRVFTD | |
| | KTSATVICRK NASISVRAQD RCYSSSWSEW | |
| | ASVPCSPKS SDKTHTCPPC PAPEAAGGPS | |
| | VFLFPPKPKD TLMISRTPEVTCVVVDVSHE | |
| | DPEVKFNWYV DGVEVHNAKT KPREEQYNST | |
| | YRVVSVLTVLHQDWLNGKEY KCKVSNKALA | |
| | APIEKTISKAKGQPREPQVCTLPPSRDELTENQ | |
| | VSLTCLVKGFYPSDIAVEWESNGQPENNYKTT | |
| | PPVLDSDGSFFLYSWLTVDKSRWQQGNVFSCS | |
| | VMH EALHNHYTQK SLSLSPG | |
| GGGGSGGG | (SEQ ID NO: 192) | IgG1 (IL-12 p35) |
| GSGGGGSEP | RNLPVATPDP GMFPCLHHSQ NLLRAVSNML | Heterodimerization |
| KSSDKTHTC | QKARQTLEFY PCTSEEIDHE DITKDKTSTV | mutations: |
| PPCPAPEAA | EACLPLELTK NESCLNSRET SFITNGSCLA | Q347R/D399V/F405T |
| GG (SEQ ID | SRKTSFMMAL CLSSIYEDLK MYQVEFKTMN | p35 substitution: |
| NO: 10) | AKLLMDPKRQ IFLDQNMLAV IDELMQALNF | V185C (native disulfide |
| | NSETVPQKSS LEEPDFYKTK IKLCILLHAF | bond between subunits |
| | RIRACTIDRV MSYLNASGGGGSGGGGSGGG | is preserved) |
| | GSEPKSSDKT HTCPPCPAPEAAGGPSVFLF | Substitutions for |
| | PPKPKDTLMISRTPEVTCVV VDVSHEDPEV | reducing FcγR binding: |
| | KFNWYVDGVE VHNAKTKPRE EQYNSTYRVV | L234A, L235A, P329A |
| | SVLTVLHQDW LNGKEYKCKV SNKALAAPIE | C220 in the upper hinge |
| | KTISKAKGQP REPRVYTLPPCRDELTKNQV | is mutated to S |
| | SLTCLVKGFY PSDIAVEWES NGQPENNYKT | |
| | TPPVLVSDGS FTLYSKLTVD KSRWQQGNVF | |
| | SCSVMHEALH NHYTQKSLSL SPG | |

Construct 120-7

| | | |
|---|---|---|
| EPKSSDKTH | (SEQ ID NO: 193) | IgG1 (IL-12 p40) |
| TCPPCPAPEA | IWELKKDVYV VELDWYPDAP GEMVVLTCDT | Heterodimerization |
| EGA (SEQ ID | PEEDGITWTL DQSSEVLGSG KTLTIQVKEF | mutations: |
| NO: 11) | GDAGQYTCHK GGEVLSHSLL LLHKKEDGIW | K360E/K409W |
| OR | STDILKDQKE PKNKTFLRCE AKNYSGRFTC | p40 substitution: |
| PKSSDKTHT | WWLTTISTDL TFSVKSSRGS SDPQGVTCGA | Y292C (native disulfide |
| CPPCPAPEAE | ATLSAERVRG DNKEYEYSVE CQEDSACPAA | bond between subunits |
| GA (SEQ ID | EESLPIEVMV DAVHKLKYEN YTSSFFIRDI | is preserved) |
| NO: 240) | IKPDPPKNLQ LKPLKNSRQV EVSWEYPDTW | Substitutions for |
| | STPHSYFSLT FCVQVQGKSK REKKDRVFTD | reducing FcγR and C1q |
| | KTSATVICRK NASISVRAQD RCYSSSWSEW | binding: L234A, |
| | ASVPCSEPKS SDKTHTCPPC PAPEAEGAPS | L235E, G237A, |
| | VFLFPPKPKD TLMISRTPEV TCVVVDVSHE | A330S, P331S |
| | DPEVKFNWYV DGVEVHNAKT KPREEQYNST | C220 in the upper hinge |
| | YRVVSVLTVL HQDWLNGKEY KCKVSNKALP | is mutated to S |
| | SSIEKTISKA KGQPREPQVC | |
| | TLPPSRDELTENQVSLTCLV KGFYPSDIAV | |
| | EWESNGQPEN NYKTTPPVLD | |
| | SDGSFFLYSWLTVDKSRWQQ GNVFSCSVMH | |
| | EALHNHYTQK SLSLSPG | |
| | OR | |
| | (SEQ ID NO: 276) | |
| | IWELKKDVYV VELDWYPDAP GEMVVLTCDT | |
| | PEEDGITWTL DQSSEVLGSG KTLTIQVKEF | |
| | GDAGQYTCHK GGEVLSHSLL LLHKKEDGIW | |
| | STDILKDQKE PKNKTFLRCE AKNYSGRFTC | |
| | WWLTTISTDL TFSVKSSRGS SDPQGVTCGA | |
| | ATLSAERVRG DNKEYEYSVE CQEDSACPAA | |
| | EESLPIEVMV DAVHKLKYEN YTSSFFIRDI | |
| | IKPDPPKNLQ LKPLKNSRQV EVSWEYPDTW | |
| | STPHSYFSLT FCVQVQGKSK REKKDRVFTD | |
| | KTSATVICRK NASISVRAQD RCYSSSWSEW | |
| | ASVPCSPKS SDKTHTCPPC PAPEAEGAPS | |
| | VFLFPPKPKD TLMISRTPEV TCVVVDVSHE | |
| | DPEVKFNWYV DGVEVHNAKT KPREEQYNST | |
| | YRVVSVLTVL HQDWLNGKEY KCKVSNKALP | |
| | SSIEKTISKA KGQPREPQVC | |
| | TLPPSRDELTENQVSLTCLV KGFYPSDIAV | |
| | EWESNGQPEN NYKTTPPVLD | |
| | SDGSFFLYSWLTVDKSRWQQ GNVFSCSVMH | |
| | EALHNHYTQK SLSLSPG | |
| GGGGSGGG | (SEQ ID NO: 194) | IgG1 (IL-12 p35) |
| GSGGGGSEP | RNLPVATPDP GMFPCLHHSQ NLLRAVSNML | Heterodimerization |
| KSSDKTHTC | QKARQTLEFY PCTSEEIDHE DITKDKTSTV | mutations: |
| PPCPAPEAEG | EACLPLELTK NESCLNSRET SFITNGSCLA | Q347R/D399V/F405T |
| A (SEQ ID | SRKTSFMMAL CLSSIYEDLK MYQVEFKTMN | p35 substitution: |
| NO: 12) | AKLLMDPKRQ IFLDQNMLAV IDELMQALNF | V185C (native disulfide |
| | NSETVPQKSS LEEPDFYKTK IKLCILLHAF | bond between subunits |
| | RIRACTIDRV MSYLNASGGG GSGGGGSGGG | is preserved) |
| | GSEPKSSDKT HTCPPCPAPE AEGAPSVFLF | Substitutions for |
| | PPKPKDTLMISRTPEVTCVV VDVSHEDPEV | reducing FcγR and C1q |
| | KFNWYVDGVE VHNAKTKPRE EQYNSTYRVV | binding: L234A, |
| | SVLTVLHQDW LNGKEYKCKV SNKALPSSIE | L235E, G237A, |
| | KTISKAKGQP REPRVYTLPP CRDELTKNQV | A330S, P331S |
| | SLTCLVKGFY PSDIAVEWES NGQPENNYKT | C220 in the upper hinge |
| | TPPVLVSDGS FTLYSKLTVD KSRWQQGNVF | is mutated to S |
| | SCSVMHEALH NHYTQKSLSL SPG | |

Construct 121

| | | |
|---|---|---|
| EPKSSDKTH | (SEQ ID NO: 195) | IgG1 (IL-12 p40) |
| TCPPCPAPEA | IWELKKDVYV VELDWYPDAP GEMVVLTCDT | Heterodimerization |
| AGG (SEQ ID | PEEDGITWTL DQSSEVLGSG KTLTIQVKEF | mutations: |
| NO: 9) | GDAGQYTCHK GGEVLSHSLL LLHKKEDGIW | K360E/K409W |
| OR | STDILKDQKE PKNKTFLRCE AKNYSGRFTC | Substitution for |
| PKSSDKTHT | WWLTTISTDL TFSVKSSRGS SDPQGVTCGA | stabilizing disulfide |
| CPPCPAPEA | ATLSAERVRG DNKEYEYSVE CQEDSACPAA | bond: Y349C |
| AGG (SEQ ID | EESLPIEVMV DAVHKLKYEN YTSSFFIRDI | Substitutions for |
| NO: 239) | IKPDPPKNLQ LKPLKNSRQV EVSWEYPDTW | reducing FcyR binding: |
| | STPHSYFSLT FCVQVQGKSK REKKDRVFTD | L234A, L235A |
| | KTSATVICRK NASISVRAQD RCYSSSWSEW | Additional mutation in |
| | ASVPCSEPKS SDKTHTCPPC PAPEAAGGPS | p40: Y292C to |
| | VFLFPPKPKD TLMISRTPEV TCVVVDVSHE | introduce IL-12 |
| | DPEVKFNWYV DGVEVHNAKT KPREEQYNST | stabilizing disulfide |
| | YRVVSVLTVL HQDWLNGKEY KCKVSNKALP | bond |
| | APIEKTISKA KGQPREPQVC TLPPSRDELT | C220 in the upper hinge |
| | ENQVSLTCLV KGFYPSDIAV EWESNGQPEN | is mutated to S |
| | NYKTTPPVLD SDGSFFLYSW LTVDKSRWQQ | |
| | GNVFSCSVMH EALHNHYTQK SLSLSPG | |
| | OR | |
| | (SEQ ID NO: 277) | |
| | IWELKKDVYV VELDWYPDAP GEMVVLTCDT | |
| | PEEDGITWTL DQSSEVLGSG KTLTIQVKEF | |
| | GDAGQYTCHK GGEVLSHSLL LLHKKEDGIW | |
| | STDILKDQKE PKNKTFLRCE AKNYSGRFTC | |
| | WWLTTISTDL TFSVKSSRGS SDPQGVTCGA | |
| | ATLSAERVRG DNKEYEYSVE CQEDSACPAA | |
| | EESLPIEVMV DAVHKLKYEN YTSSFFIRDI | |
| | IKPDPPKNLQ LKPLKNSRQV EVSWEYPDTW | |
| | STPHSYFSLT FCVQVQGKSK REKKDRVFTD | |
| | KTSATVICRK NASISVRAQD RCYSSSWSEW | |
| | ASVPCSPKS SDKTHTCPPC PAPEAAGGPS | |
| | VFLFPPKPKD TLMISRTPEV TCVVVDVSHE | |
| | DPEVKFNWYV DGVEVHNAKT KPREEQYNST | |
| | YRVVSVLTVL HQDWLNGKEY KCKVSNKALP | |
| | APIEKTISKA KGQPREPQVC TLPPSRDELT | |
| | ENQVSLTCLV KGFYPSDIAV HWHSNGQPHN | |
| | NYKTTPPVLD SDGSFFLYSW LTVDKSRWQQ | |
| | GNVFSCSVMH EALHNHYTQK SLSLSPG | |
| GGGGSGGG | (SEQ ID NO: 196) | IgG1 (IL-12 p35) |
| GSGGGGSEP | RNLPVATPDP GMFPCLHHSQ NLLRAVSNML | Heterodimerization |
| KSSDKTHTC | QKARQTLEFY PCTSEEIDHE DITKDKTSTV | mutations: |
| PPCPAPEAA | EACLPLELTK NESCLNSRET SFITNGSCLA | Q347R/D399V/F405T |
| GG (SEQ ID | SRKTSFMMAL CLSSIYEDLK MYQVEFKTMN | Substitution for |
| NO: 10) | AKLLMDPKRQ IFLDQNMLAV IDELMQALNF | stabilizing disulfide |
| | NSETVPQKSS LEEPDFYKTK IKLCILLHAF | bond: S354C |
| | RIRACTIDRV MSYLNASGGG GSGGGGSGGG | Substitutions for |
| | GSEPKSSDKT HTCPPCPAPE AAGGPSVFLF | reducing FcγR binding: |
| | PPKPKDTLMI SRTPEVTCVV VDVSHEDPEV | L234A, L235A |
| | KFNWYVDGVE VHNAKTKPRE EQYNSTYRVV | Additional mutation in |
| | SVLTVLHQDW LNGKEYKCKV SNKALPAPIE | p35: V185C to |
| | KTISKAKGQP REPRVYTLPPCRDELTKNQV | introduce IL-12 |
| | SLTCLVKGFY PSDIAVEWES NGQPENNYKT | stabilizing disulfide |
| | TPPVLVSDGS FTLYSKLTVD KSRWQQGNVF | bond |
| | SCSVMHEALH NHYTQKSLSL SPG | C220 in the upper hinge |
| | | is mutated to S |

Construct 122

| | | |
|---|---|---|
| EPKSSDKTH | (SEQ ID NO: 197) | IgG1 (IL-12 p40) |
| TCPPCPAPEA | IWELKKDVYV VELDWYPDAP GEMVVLTCDT | Heterodimerization |
| AGG (SEQ ID | PEEDGITWTL DQSSEVLGSG KTLTIQVKEF | mutations: |
| NO: 9) | GDAGQYTCHK GGEVLSHSLL LLHKKEDGIW | K360E/K409W |
| OR | STDILKDQKE PKNKTFLRCE AKNYSGRFTC | Substitution for |
| PKSSDKTHT | WWLTTISTDL TFSVKSSRGS SDPQGVTCGA | stabilizing disulfide |
| CPPCPAPEA | ATLSAERVRG DNKEYEYSVE CQEDSACPAA | bond: Y349C |
| AGG (SEQ ID | EESLPIEVMV DAVHKLKYEN YTSSFFIRDI | Substitutions for |
| NO: 239) | IKPDPPKNLQ LKPLKNSRQV EVSWEYPDTW | reducing FcγR binding: |
| | STPHSYFSLT FCVQVQGKSK REKKDRVFTD | L234A, L235A, P329A |
| | KTSATVICRK NASISVRAQD | Additional mutation |
| | RCYSSSWSEWASVPCSEPKS SDKTHTCPPC | Y292C to introduce IL- |
| | PAPEAAGGPS VFLFPPKPKD TLMISRTPEV | 12 stabilizing disulfide |
| | TCVVVDVSHEDPEVKFNWYVDGVEVHNAKT | bond |
| | KPREEQYNST YRVVSVLTVLHQDWLNGKEY | C220 in the upper hinge |
| | KCKVSNKALA APIEKTISKA KGQPREPQVC | is mutated to S |
| | TLPPSRDELTENQVSLTCLV KGFYPSDIAV | |
| | EWESNGQPENNYKTTPPVLDSDGSFFLYSWLT | |
| | VDKSRWQQ GNVFSCSVMH EALHNHYTQK | |
| | SLSLSPG | |
| | OR | |
| | (SEQ ID NO: 278) | |
| | IWELKKDVYV VELDWYPDAP GEMVVLTCDT | |
| | PEEDGITWTL DQSSEVLGSG KTLTIQVKEF | |
| | GDAGQYTCHK GGEVLSHSLL LLHKKEDGIW | |
| | STDILKDQKE PKNKTFLRCE AKNYSGRFTC | |
| | WWLTTISTDL TFSVKSSRGS SDPQGVTCGA | |
| | ATLSAERVRG DNKEYEYSVE CQEDSACPAA | |
| | EESLPIEVMV DAVHKLKYEN YTSSFFIRDI | |
| | IKPDPPKNLQ LKPLKNSRQV EVSWEYPDTW | |
| | STPHSYFSLT FCVQVQGKSK REKKDRVFTD | |
| | KTSATVICRK NASISVRAQD RCYSSSWSEW | |
| | ASVPCSPKS SDKTHTCPPC PAPEAAGGPS | |
| | VFLFPPKPKD TLMISRTPEV TCVVVDVSH | |
| | EDPEVKFNW YVDGVEVHN AKTKPREEQ | |
| | YNST YRVVSVLTVLHQDWLNGKEY | |
| | KCKVSNKALA APIEKTISKA KGQPREPQVC | |
| | TLPPSRDELTENQVSLTCLV KGFYPSDIAV | |
| | EWESNGQPENNYKTTPPVLDSDGSFFLYSWLT | |
| | VDKSRWQQ GNVFSCSVMH EALHNHYTQK | |
| | SLSLSPG | |
| GGGGSGGG | (SEQ ID NO: 198) | IgG1 (IL-12 p35) |
| GSGGGGSEP | RNLPVATPDP GMFPCLHHSQ NLLRAVSNML | Heterodimerization |
| KSSDKTHTC | QKARQTLEFY PCTSEEIDHE DITKDKTSTV | mutations: |
| PPCPAPEAA | EACLPLELTK NESCLNSRET SFITNGSCLA | Q347R/D399V/F405T |
| GG (SEQ ID | SRKTSFMMAL CLSSIYEDLK MYQVEFKTMN | Substitution for |
| NO: 10) | AKLLMDPKRQ IFLDQNMLAV IDELMQALNF | stabilizing disulfide |
| | NSETVPQKSS LEEPDFYKTK IKLCILLHAF | bond: S354C |
| | RIRACTIDRV MSYLNASGGG GSGGGGSGGG | Substitutions for |
| | GSEPKSSDKT HTCPPCPAPE AAGGPSVFLF | reducing FcγR binding: |
| | PPKPKDTLMISRTPEVTCVV VDVSHEDPEV | L234A, L235A, P329A |
| | KFNWYVDGVEVHNAKTKPREEQYNSTYRVV | Additional mutation |
| | SVLTVLHQDW LNGKEYKCKV SNKALAAPIE | V185C to introduce IL- |
| | KTISKAKGQP REPRVYTLPP CRDELTKNQV | 12 stabilizing disulfide |
| | SLTCLVKGFY PSDIAVEWES NGQPENNYKT | bond |
| | TPPVLVSDGS FTLYSKLTVD KSRWQQGNVF | C220 in the upper hinge |
| | SCSVMHEALH NHYTQKSLSL SPG | is mutated to S |

Construct 123

| | | |
|---|---|---|
| EPKSSDKTH | (SEQ ID NO: 199) | IgG1 (IL-12 p40) |
| TCPPCPAPEA | IWELKKDVYV VELDWYPDAP GEMVVLTCDT | Heterodimerization |
| EGA (SEQ ID | PEEDGITWTL DQSSEVLGSG KTLTIQVKEF | mutations: |
| NO: 11) | GDAGQYTCHK GGEVLSHSLL LLHKKEDGIW | K360E/K409W |
| OR | STDILKDQKE PKNKTFLRCE AKNYSGRFTC | Substitution for |
| PKSSDKTHT | WWLTTISTDL TFSVKSSRGS SDPQGVTCGA | stabilizing disulfide |
| CPPCPAPEAE | ATLSAERVRG DNKEYEYSVE CQEDSACPAA | bond: Y349C |
| GA (SEQ ID | EESLPIEVMV DAVHKLKYEN YTSSFFIRDI | Substitutions for |
| NO: 240) | IKPDPPKNLQ LKPLKNSRQV EVSWEYPDTW | reducing FcyR and C1q |
| | STPHSYFSLT FCVQVQGKSK REKKDRVFTD | binding: L234A, |
| | KTSATVICRK NASISVRAQD RCYSSSWSEW | L235E, G237A, |
| | ASVPCSEPKS SDKTHTCPPC PAPEAEGAPS | A330S, P331S |
| | VFLFPPKPKD TLMISRTPEVTCVVVDVSHE | Additional mutation |
| | DPEVKFNWYV DGVEVHNAKT KPREEQYNST | Y292C to introduce IL- |
| | YRVVSVLTVLHQDWLNGKEY KCKVSNKALP | 12 stabilizing disulfide |
| | SSIEKTISKA KGQPREPQVC TLPPSRDELT | bond |
| | ENQVSLTCLV KGFYPSDIAV EWESNGQPEN | C220 in the upper hinge |
| | NYKTTPPVLD SDGSFFLYSWLTVDKSRWQQ | is mutated to S |
| | GNVFSCSVMH EALHNHYTQK SLSLSPG | |
| | OR | |
| | (SEQ ID NO: 279) | |
| | IWELKKDVYV VELDWYPDAP GEMVVLTCDT | |
| | PEEDGITWTL DQSSEVLGSG KTLTIQVKEF | |
| | GDAGQYTCHK GGEVLSHSLL LLHKKEDGIW | |
| | STDILKDQKE PKNKTFLRCE AKNYSGRFTC | |
| | WWLTTISTDL TFSVKSSRGS SDPQGVTCGA | |
| | ATLSAERVRG DNKEYEYSVE CQEDSACPAA | |
| | EESLPIEVMV DAVHKLKYEN YTSSFFIRDI | |
| | IKPDPPKNLQ LKPLKNSRQV EVSWEYPDTW | |
| | STPHSYFSLT FCVQVQGKSK REKKDRVFTD | |
| | KTSATVICRK NASISVRAQD RCYSSSWSEW | |
| | ASVPCSPKS SDKTHTCPPC PAPEAEGAPS | |
| | VFLFPPKPKD TLMISRTPEVTCVVVDVSHE | |
| | DPEVKFNWYV DGVEVHNAKT KPREEQYNST | |
| | YRVVSVLTVLHQDWLNGKEY KCKVSNKALP | |
| | SSIEKTISKA KGQPREPQVC TLPPSRDELT | |
| | ENQVSLTCLA KGFYPSDIAV EWESNGQPEN | |
| | NYKTTPPVLD SDGSFFLYSWLTVDKSRWQQ | |
| | GNVFSCSVMH EALHNHYTQK SLSLSPG | |
| GGGGSGGG | (SEQ ID NO: 200) | IgG1 (IL-12 p35) |
| GSGGGGSEP | RNLPVATPDP GMFPCLHHSQ NLLRAVSNML | Heterodimerization |
| KSSDKTHTC | QKARQTLEFY PCTSEEIDHE DITKDKTSTV | mutations: |
| PPCPAPEAEG | EACLPLELTK NESCLNSRET SFITNGSCLA | Q347R/D399V/F405T |
| A (SEQ ID | SRKTSFMMAL CLSSIYEDLK MYQVEFKTMN | Substitution for |
| NO: 12) | AKLLMDPKRQ IFLDQNMLAV IDELMQALNF | stabilizing disulfide |
| | NSETVPQKSS LEEPDFYKTK IKLCILLHAF | bond: S354C |
| | RIRACTIDRV MSYLNASGGG GSGGGGSGGG | Substitutions for |
| | GSEPKSSDKT HTCPPCPAPE AEGAPSVFLF | reducing FcγR and C1q |
| | PPKPKDTLMISRTPEVTCVV VDVSHEDPEV | binding: L234A, |
| | KFNWYVDGVE VHNAKTKPRE EQYNSTYRVV | L235E, G237A, |
| | SVLTVLHQDW LNGKEYKCKV SNKALPSSIE | A330S, P331S |
| | KTISKAKGQP REPRVYTLPP CRDELTKNQV | Additional mutation |
| | SLTCLVKGFY PSDIAVEWES NGQPENNYKT | V185C to introduce |
| | TPPVLVSDGS FTLYSKLTVD KSRWQQGNVF | IL-12 stabilizing disulfide |
| | SCSVMHEALH NHYTQKSLSL SPG | bond |
| | | C220 in the upper |
| | | hinge |
| | | is mutated to S |

*The amino acid sequences can further comprise a lysine (K) at the C-terminus.

TABLE 5
Exemplary Dimeric Fc-fused Proteins

| | | |
|---|---|---|
| | | Type of IgG |
| | | (IL-12 |
| | | subunit); |
| Linker | Sequences of Heterodimeric | mutations/ |
| Sequence | Fc-fused Proteins* | substitutions |

Construct 1

| | | |
|---|---|---|
| RVESKYGPP | (SEQ ID NO: 17) | IgG4 (IL-12 p40) |
| CPPCPAPEFL | IWELRKDVYV VELDWYPDAP GEMVVLTCDT | Heterodimerization |
| GG (SEQ ID | PEEDGITWTL DQSSEVLGSG KTLTIRVKEF | mutations: |
| NO: 2) | GDAGQYTCHK GGEVLSHSLL LLHKKEDGIW | K370E/R409W |
| | STDILKDQKE PKNKTFLRCE AKNYSGRFTC | Substitution for |
| | WWLTTISTDL TFSVKSSRGS SDPQGVTCGA | stabilizing |
| | ATLSAERVRG DNKEYEYSVE CQEDSACPAA | disulfide |
| | EESLPIEVMV DAVHKLKYEN YTSSFFIRDI | bond: Y349C |
| | IKPDPPKNLQ LKPLKNSRQV EVSWEYPDTW | Substitution for |
| | STPHSYFSLT FCVQVQGKSK REKKDRVFTD | preventing Fab-arm |
| | KTSATVICRK NASISVRAQD RYYSSSWSEW | exchange and |
| | ASVPCSRVES KYGPPCPPCP APEFLGGPSV | improving |
| | FLFPPKPKDT LMISRTPEVT CVVVDVSQED | thermostability: |
| | PEVQFNWYVD GVEVHNAKTK PREEQFNSTY | S228P |
| | RVVSVLTVLH QDWLNGKEYK CKVSNKGLPS | |
| | SIEKTISKAK GQPREPQVCT LPPSQEEMTK | |
| | NQVSLTCLVE GFYPSDIAVE WESNGQPENN | |
| | YKTTPPVLDS DGSFFLYSWL TVDKSRWQEG | |
| | NVFSCSVMHE ALHNHYTQKS LSLSLG | |
| GGGGSGGG | (SEQ ID NO: 18) | IgG4 (IL-12 p35) |
| GSGGGGSRV | RNLPVATPDP GMFPCLHHSQ NLLRAVSNML | Heterodimerization |
| ESKYGPPCPP | QKARQTLEFY PCTSEEIDHV DITKDKTSTV | mutations: |
| CPAPEFLGG | EACLPLELTK NESCLNSRET SFITNGSCLA | E357N/D399V/F405T |
| (SEQ ID | SRKTSFMMAL CLSSIYEDLK MYQVEFKTMN | Substitution for |
| NO: 3) | AKLLMDPKRQ IFLDQNMLAV IDELMQALNF | stabilizing |
| | NSETVPQKSS LEEPDFYKTK IKLCILLHAF | disulfide |
| | RIRAVTIDRV MSYLNASGGG GSGGGGSGGG | bond: S354C |
| | GSRVESKYGP PCPPCPAPEF LGGPSVFLFP | Substitution for |
| | PKPKDTLMIS RTPEVTCVVV DVSQEDPEVQ | preventing Fab-arm |
| | FNWYVDGVEV HNAKTKPREE QFNSTYRVVS | exchange and |
| | VLTVLHQDWL NGKEYKCKVS NKGLPSSIEK | improving |
| | TISKAKGQPR EPQVYTLPPC QENMTKNQVS | thermostability: |
| | LTCLVKGFYP SDIAVEWESN GQPENNYKTT | S228P |
| | PPVLVSDGSF TLYSRLTVDK SRWQEGNVFS | |
| | CSVMHEALHN HYTQKSLSLS LG | |

Construct 2

| | | |
|---|---|---|
| RVESKYGPP | (SEQ ID NO: 19) | IgG4 (IL-12 p40) |
| CPPCPAPEFL | IWELKKDVYV VELDWYPDAP GEMVVLTCDT | Heterodimerization |
| GG (SEQ ID | PEEDGITWTL DQSSEVLGSG KTLTIRVKEF | mutations: |
| NO: 2) | GDAGQYTCHK GGEVLSHSLL LLHKKEDGIW | K360E/R409W |
| | STDILKDQKE PKNKTFLRCE AKNYSGRFTC | Substitution for |
| | WWLTTISTDL TFSVKSSRGS SDPQGVTCGA | stabilizing |
| | ATLSAERVRG DNKEYEYSVE CQEDSACPAA | disulfide |
| | EESLPIEVMV DAVHKLKYEN YTSSFFIRDI | bond: Y349C |
| | IKPDPPKNLQ LKPLKNSRQV EVSWEYPDTW | Substitution for |
| | STPHSYFSLT FCVQVQGKSK REKKDRVFTD | preventing Fab-arm |
| | KTSATVICRK NASISVRAQD RYYSSSWSEW | exchange and |
| | ASVPCSRVES KYGPPCPPCP APEFLGGPSV | improving |
| | FLFPPKPKDT LMISRTPEVT CVVVDVSQED | thermostability: |
| | PEVQFNWYVD GVEVHNAKTK PREEQFNSTY | S228P |
| | RVVSVLTVLH QDWLNGKEYK CKVSNKGLPS | |
| | SIEKTISKAK GQPREPQVCT LPPSQEEMTE | |
| | NQVSLTCLVK GFYPSDIAVE WESNGQPENN | |
| | YKTTPPVLDS DGSFFLYSWL TVDKSRWQEG | |
| | NVFSCSVMHE ALHNHYTQKS LSLSLG | |
| GGGGSGGG | (SEQ ID NO: 20) | IgG4 (IL-12 p35) |
| GSGGGGSRV | RNLPVATPDP GMFPCLHHSQ NLLRAVSNML | Heterodimerization |
| ESKYGPPCPP | QKARQTLEFY PCTSEEIDHV DITKDKTSTV | mutations: |
| CPAPEFLGG | EACLPLELTK NESCLNSRET SFITNGSCLA | Q347R/D399V/F405T |
| (SEQ ID | SRKTSFMMAL CLSSIYEDLK MYQVEFKTMN | Substitution for |
| NO: 3) | AKLLMDPKRQ IFLDQNMLAV IDELMQALNF | stabilizing |
| | NSETVPQKSS LEEPDFYKTK IKLCILLHAF | disulfide |
| | RIRAVTIDRV MSYLNASGGG GSGGGGSGGG | bond: S354C |
| | GSRVESKYGP PCPPCPAPEF LGGPSVFLFP | Substitution for |
| | PKPKDTLMIS RTPEVTCVVV DVSQEDPEVQ | preventing Fab-arm |
| | FNWYVDGVEV HNAKTKPREE QFNSTYRVVS | exchange and |
| | VLTVLHQDWL NGKEYKCKVS NKGLPSSIEK | improving |
| | TISKAKGQPR EPRVYTLPPC QEEMTKNQVS | thermostability: |
| | LTCLVKGFYP SDIAVEWESN GQPENNYKTT | S228P |
| | PPVLVSDGSF TLYSRLTVDK SRWQEGNVFS | |
| | CSVMHEALHN HYTQKSLSLS LG | |

Construct 3

| | | |
|---|---|---|
| RVESKYGPP | (SEQ ID NO: 21) | IgG4 (IL-12 p40) |
| CPPCPAPEFE | IWELKKDVYV VELDWYPDAP GEMVVLTCDT | Heterodimerization |
| GG (SEQ ID | PEEDGITWTL DQSSEVLGSG KTLTIRVKEF | mutations: |
| NO: 4) | GDAGQYTCHK GGEVLSHSLL LLHKKEDGIW | K360E/R409W |
| | STDILKDQKE PKNKTFLRCE AKNYSGRFTC | Substitution for |
| | WWLTTISTDL TFSVKSSRGS SDPQGVTCGA | stabilizing |
| | ATLSAERVRG DNKEYEYSVE CQEDSACPAA | disulfide |
| | EESLPIEVMV DAVHKLKYEN YTSSFFIRDI | bond: Y349C |
| | IKPDPPKNLQ LKPLKNSRQV EVSWEYPDTW | Substitution for |
| | STPHSYFSLT FCVQVQGKSK REKKDRVFTD | preventing Fab-arm |
| | KTSATVICRK NASISVRAQD RYYSSSWSEW | exchange and |
| | ASVPCSRVES KYGPPCPPCP APEFEGGPSV | improving |
| | FLFPPKPKDT LMISRTPEVT CVVVDVSQED | thermostability: |
| | PEVQFNWYVD GVEVHNAKTK PREEQFNSTY | S228P |
| | RVVSVLTVLH QDWLNGKEYK CKVSNKGLPS | Substitutions for |
| | SIEKTISKAK GQPREPQVCT LPPSQEEMTE | reducing FcγR |
| | NQVSLTCLVK GFYPSDIAVE WESNGQPENN | binding: |
| | YKTTPPVLDS DGSFFLYSWL TVDKSRWQEG | S228P and L235E |
| | NVFSCSVMHE ALHNHYTQKS LSLSLG | |
| GGGGSGGG | (SEQ ID NO: 22) | IgG4 (IL-12 p35) |
| GSGGGGSRV | RNLPVATPDP GMFPCLHHSQ NLLRAVSNML | Heterodimerization |
| ESKYGPPCPP | QKARQTLEFY PCTSEEIDHV DITKDKTSTV | mutations: |
| CPAPEFEGG | EACLPLELTK NESCLNSRET SFITNGSCLA | Q347R/D399V/F405T |
| (SEQ ID | SRKTSFMMAL CLSSIYEDLK MYQVEFKTMN | Substitution for |
| NO: 5) | AKLLMDPKRQ IFLDQNMLAV IDELMQALNF | stabilizing |
| | NSETVPQKSS LEEPDFYKTK IKLCILLHAF | disulfide |
| | RIRAVTIDRV MSYLNASGGG GSGGGGSGGG | bond: S354C |
| | GSRVESKYGP PCPPCPAPEF EGGPSVFLFP | Substitution for |
| | PKPKDTLMIS RTPEVTCVVV DVSQEDPEVQ | preventing |
| | FNWYVDGVEV HNAKTKPREE QFNSTYRVVS | Fab-arm |
| | VLTVLHQDWL NGKEYKCKVS NKGLPSSIEK | exchange and |
| | TISKAKGQPR EPRVYTLPPC QEEMTKNQVS | improving |
| | LTCLVKGFYP SDIAVEWESN GQPENNYKTT | thermostability: |
| | PPVLVSDGSF TLYSRLTVDK SRWQEGNVFS | S228P |
| | CSVMHEALHN HYTQKSLSLS LG | Substitutions |
| | | For reducing |
| | | FcγR binding: |
| | | S228P and L235E |

Construct 4

| | | |
|---|---|---|
| RVESKYGPP | (SEQ ID NO: 23) | IgG4 (IL-12 p40) |
| CPPCPAPEFE | IWELKKDVYV VELDWYPDAP GEMVVLTCDT | Heterodimerization |
| GG (SEQ ID | PEEDGITWTL DQSSEVLGSG KTLTIRVKEF | mutations: |
| NO: 4) | GDAGQYTCHK GGEVLSHSLL LLHKKEDGIW | K360E/R409W |
| | STDILKDQKE PKNKTFLRCE AKNYSGRFTC | Substitution for |
| | WWLTTISTDL TFSVKSSRGS SDPQGVTCGA | stabilizing |
| | ATLSAERVRG DNKEYEYSVE CQEDSACPAA | disulfide |
| | EESLPIEVMV DAVHKLKYEN YTSSFFIRDI | bond: Y349C |
| | IKPDPPKNLQ LKPLKNSRQV EVSWEYPDTW | Substitution for |
| | STPHSYFSLT FCVQVQGKSK REKKDRVFTD | preventing |
| | KTSATVICRK NASISVRAQD RYYSSSWSEW | Fab-Arm |
| | ASVPCSRVES KYGPPCPPCP APEFEGGPSV | exchange and |
| | FLFPPKPKDT LMISRTPEVT CVVVDVSQED | improving |
| | PEVQFNWYVD GVEVHNAKTK PREEQFNSTY | thermostability: |
| | RVVSVLTVLH QDWLNGKEYK CKVSNKGLAS | S228P |
| | SIEKTISKAK GQPREPQVCT LPPSQEEMTE | Substitutions |
| | NQVSLTCLVK GFYPSDIAVE WESNGQPENN | for |
| | YKTTPPVLDS DGSFFLYSWL TVDKSRWQEG | reducing FcγR |
| | NVFSCSVMHE ALHNHYTQKS LSLSLG | binding: |
| | | S228P, L235E, |
| | | P329A |
| GGGGSGGG | (SEQ ID NO: 24) | IgG4 (IL-12 p35) |
| GSGGGGSRV | RNLPVATPDP GMFPCLHHSQ NLLRAVSNML | Heterodimerization |
| ESKYGPPCPP | QKARQTLEFY PCTSEEIDHV DITKDKTSTV | mutations: |
| CPAPEFEGG | EACLPLELTK NESCLNSRET SFITNGSCLA | Q347R/D399V/F405T |
| (SEQ ID | SRKTSFMMAL CLSSIYEDLK MYQVEFKTMN | Substitution for |
| NO: 5) | AKLLMDPKRQ IFLDQNMLAV IDELMQALNF | stabilizing disulfide |
| | NSETVPQKSS LEEPDFYKTK IKLCILLHAF | bond: S354C |
| | RIRAVTIDRV MSYLNASGGG GSGGGGSGGG | Substitution for |
| | GSRVESKYGP PCPPCPAPEF EGGPSVFLFP | preventing Fab-Arm |
| | PKPKDTLMIS RTPEVTCVVV DVSQEDPEVQ | exchange and |
| | FNWYVDGVEV HNAKTKPREE QFNSTYRVVS | improving |
| | VLTVLHQDWL NGKEYKCKVS NKGLASSIEK | thermostability: S228P |
| | TISKAKGQPR EPRVYTLPPC QEEMTKNQVS | Substitutions for |
| | LTCLVKGFYP SDIAVEWESN GQPENNYKTT | reducing FcγR binding: |
| | PPVLVSDGSF TLYSRLTVDK SRWQEGNVFS | S228P, L235E,P329A |
| | CSVMHEALHN HYTQKSLSLS LG | |

Construct 5

| | | |
|---|---|---|
| RVESKYGPP | (SEQ ID NO: 25) | IgG4 (IL-12 p40) |
| CPPCPAPEFE | IWELKKDVYV VELDWYPDAP GEMVVLTCDT | Heterodimerization |
| GG (SEQ ID | PEEDGITWTL DQSSEVLGSG KTLTIRVKEF | mutations: |
| NO: 4) | GDAGQYTCHK GGEVLSHSLL LLHKKEDGIW | K360E/R409W |
| | STDILKDQKE PKNKTFLRCE AKNYSGRFTC | Substitution for |
| | WWLTTISTDL TFSVKSSRGS SDPQGVTCGA | stabilizing disulfide |
| | ATLSAERVRG DNKEYEYSVE CQEDSACPAA | bond: Y349C |
| | EESLPIEVMV DAVHKLKYEN YTSSFFIRDI | Substitution for |
| | IKPDPPKNLQ LKPLKNSRQV EVSWEYPDTW | preventing Fab-Arm |
| | STPHSYFSLT FCVQVQGKSK REKKDRVFTD | exchange and |
| | KTSATVICRK NASISVRAQD RYYSSSWSEW | improving |
| | ASVPCSRVES KYGPPCPPCP APEFEGGPSV | thermostability: S228P |
| | FLFPPKPKDT LMISRTPEVT CVVVDVSQED | Substitutions for |
| | PEVQFNWYVD GVEVHNAKTK PREEQFNSTY | reducing FcγR binding: |
| | RVVSVLTVLH QDWLNGKEYK CKVSNKGLGS | S228P, L235E, P329G |
| | SIEKTISKAK GQPREPQVCT LPPSQEEMTE | |
| | NQVSLTCLVK GFYPSDIAVE WESNGQPENN | |
| | YKTTPPVLDS DGSFFLYSWL TVDKSRWQEG | |
| | NVFSCSVMHE ALHNHYTQKS LSLSLG | |
| GGGGSGGG | (SEQ ID NO: 26) | IgG4 (IL-12 p35) |
| GSGGGGSRV | RNLPVATPDP GMFPCLHHSQ NLLRAVSNML | Heterodimerization |
| ESKYGPPCPP | QKARQTLEFY PCTSEEIDHV DITKDKTSTV | mutations: |
| CPAPEFEGG | EACLPLELTK NESCLNSRET SFITNGSCLA | Q347R/D399V/F405T |
| (SEQ ID | SRKTSFMMAL CLSSIYEDLK MYQVEFKTMN | Substitution for |
| NO: 5) | AKLLMDPKRQ IFLDQNMLAV IDELMQALNF | stabilizing disulfide |
| | NSETVPQKSS LEEPDFYKTK IKLCILLHAF | bond: S354C |
| | RIRAVTIDRV MSYLNASGGG GSGGGGSGGG | Substitution for |
| | GSRVESKYGP PCPPCPAPEF EGGPSVFLFP | preventing Fab-Arm |
| | PKPKDTLMIS RTPEVTCVVV DVSQEDPEVQ | exchange and |
| | FNWYVDGVEV HNAKTKPREE QFNSTYRVVS | improving |
| | VLTVLHQDWL NGKEYKCKVS NKGLGSSIEK | thermostability: S228P |
| | TISKAKGQPR EPRVYTLPPC QEEMTKNQVS | Substitutions for |
| | LTCLVKGFYP SDIAVEWESN GQPENNYKTT | reducing FcγR binding: |
| | PPVLVSDGSF TLYSRLTVDK SRWQEGNVFS | S228P, L235E, P329G |
| | CSVMHEALHN HYTQKSLSLS LG | |

Construct 6

| | | |
|---|---|---|
| EPKSSDKTH | (SEQ ID NO: 27) | IgG1 (IL-12 p40) |
| TCPPCPAPEL | IWELKKDVYV VELDWYPDAP GEMVVLTCDT | Heterodimerization |
| LGG (SEQ ID | PEEDGITWTL DQSSEVLGSG KTLTIRVKEF | mutations: |
| NO: 7) | GDAGQYTCHK GGEVLSHSLL LLHKKEDGIW | K360E/K409W |
| | STDILKDQKE PKNKTFLRCE AKNYSGRFTC | Substitution for |
| | WWLTTISTDL TFSVKSSRGS SDPQGVTCGA | stabilizing disulfide |
| | ATLSAERVRG DNKEYEYSVE CQEDSACPAA | bond: Y349C |
| | EESLPIEVMV DAVHKLKYEN YTSSFFIRDI | C220 in the upper hinge |
| | IKPDPPKNLQ LKPLKNSRQV EVSWEYPDTW | is mutated to S |
| | STPIISYFSLT FCVQVQGKSK RCKKDRVFTD | |
| | KTSATVICRK NASISVRAQD RYYSSSWSEW | |
| | ASVPCSEPKS SDKTHTCPPC PAPELLGGPS | |
| | VFLFPPKPKD TLMISRTPEV TCVVVDVSHE | |
| | DPEVKFNWYV DGVEVHNAKT KPREEQYNST | |
| | YRVVSVLTVL HQDWLNGKEY KCKVSNKALP | |
| | APIEKTISKA KGQPREPQVC TLPPSRDELT | |
| | ENQVSLTCLV KGFYPSDIAV EWESNGQPEN | |
| | NYKTTPPVLD SDGSFFLYSWLTVDKSRWQQ | |
| | GNVFSCSVMH EALHNHYTQK SLSLSPG | |
| GGGGSGGG | (SEQ ID NO: 28) | IgG1 (IL-12 p35) |
| GSGGGGSEP | RNLPVATPDP GMFPCLHHSQ NLLRAVSNML | Heterodimerization |
| KSSDKTHTC | QKARQTLEFY PCTSEEIDHV DITKDKTSTV | mutations: |
| PPCPAPELLG | EACLPLELTK NESCLNSRET SFITNGSCLA | Q347R/D399V/F405T |
| G (SEQ ID | SRKTSFMMAL CLSSIYEDLK MYQVEFKTMN | Substitution for |
| NO: 8) | AKLLMDPKRQ IFLDQNMLAV IDELMQALNF | stabilizing disulfide |
| | NSETVPQKSS LEEPDFYKTK IKLCILLHAF | bond: S354C |
| | RIRAVTIDRV MSYLNASGGG GSGGGGSGGG | C220 in the upper hinge |
| | GSEPKSSDKT HTCPPCPAPE LLGGPSVFLF | is mutated to S |
| | PPKPKDTLMI SRTPEVTCVV VDVSHEDPEV | |
| | KFNWYVDGVE VHNAKTKPRE EQYNSTYRVV | |
| | SVLTVLHQDW LNGKEYKCKV SNKALPAPIE | |
| | KTISKAKGQP REPRVYTLPPCRDELTKNQV | |
| | SLTCLVKGFY PSDIAVEWES NGQPENNYKT | |
| | TPPVLVSDGSFTLYSKLTVD KSRWQQGNVF | |
| | SCSVMHEALH NHYTQKSLSL SPG | |

Construct 7

| | | |
|---|---|---|
| EPKSSDKTH | (SEQ ID NO: 29) | IgG1FcSilent |
| TCPPCPAPEA | IWELKKDVYV VELDWYPDAP GEMVVLTCDT | (IL-12 p40) |
| AGG (SEQ ID | PEEDGITWTL DQSSEVLGSG KTLTIRVKEF | Heterodimerization |
| NO: 9) | GDAGQYTCHK GGEVLSHSLL LLHKKEDGIW | mutations: |
| | STDILKDQKE PKNKTFLRCE AKNYSGRFTC | K360E/K409W |
| | WWLTTISTDL TFSVKSSRGS SDPQGVTCGA | Substitution for |
| | ATLSAERVRG DNKEYEYSVE CQEDSACPAA | stabilizing disulfide |
| | EESLPIEVMV DAVHKLKYEN YTSSFFIRDI | bond: Y349C |
| | IKPDPPKNLQ LKPLKNSRQV EVSWEYPDTW | Substitutions for |
| | STPHSYFSLT FCVQVQGKSK REKKDRVFTD | reducing FcγR binding: |
| | KTSATVICRK NASISVRAQD RYYSSSWSEW | L234A, L235A |
| | ASVPCSEPKS SDKTHTCPPC PAPEAAGGPS | C220 in the upper hinge |
| | VFLFPPKPKD TLMISRTPEV TCVVVDVSHE | is mutated to S |
| | DPEVKFNWYV DGVEVHNAKT KPREEQYNST | |
| | YRVVSVLTVLHQDWLNGKEY KCKVSNKALP | |
| | APIEKTISKA KGQPREPQVC TLPPSRDELT | |
| | ENQVSLTCLV KGFYPSDIAV EWESNGQPEN | |
| | NYKTTPPVLD SDGSFFLYSWLTVDKSRWQQ | |
| | GNVFSCSVMH EALHNHYTQK SLSLSPG | |
| GGGGSGGG | (SEQ ID NO: 30) | IgG1FcSilent |
| GSGGGGSEP | RNLPVATPDP GMFPCLHHSQ NLLRAVSNML | (IL-12 p35) |
| KSSDKTHTC | QKARQTLEFY PCTSEEIDHV DITKDKTSTV | Heterodimerization |
| PPCPAPEAA | EACLPLELTK NESCLNSRET SFITNGSCLA | mutations: |
| GG (SEQ ID | SRKTSFMMAL CLSSIYEDLK MYQVEFKTMN | Q347R/D399V/F405T |
| NO: 10) | AKLLMDPKRQ IFLDQNMLAV IDELMQALNF | Substitution for |
| | NSETVPQKSS LEEPDFYKTK IKLCILLHAF | stabilizing disulfide |
| | RIRAVTIDRV MSYLNASGGG GSGGGGSGGG | bond: S354C |
| | GSEPKSSDKT HTCPPCPAPE AAGGPSVFLF | Substitutions for |
| | PPKPKDTLMI SRTPEVTCVV VDVSHEDPEV | reducing FcγR binding: |
| | KFNWYVDGVE VHNAKTKPRE EQYNSTYRVV | L234A, L235A |
| | SVLTVLHQDW LNGKEYKCKV SNKALPAPIE | C220 in the upper hinge |
| | KTISKAKGQP REPRVYTLPPCRDELTKNQV | is mutated to S |
| | SLTCLVKGFY PSDIAVEWES NGQPENNYKT | |
| | TPPVLVSDGS FTLYSKLTVD KSRWQQGNVF | |
| | SCSVMHEALH NHYTQKSLSL SPG | |

Construct 8

| | | |
|---|---|---|
| EPKSSDKTH | (SEQ ID NO: 31) | IgG1FcSilent |
| TCPPCPAPEA | IWELKKDVYV VELDWYPDAP GEMVVLTCDT | (IL-12 p40) |
| AGG (SEQ ID | PEEDGITWTL DQSSEVLGSG KTLTIRVKEF | Heterodimerization |
| NO: 9) | GDAGQYTCHK GGEVLSHSLL LLHKKEDGIW | mutations: |
| | STDILKDQKE PKNKTFLRCE AKNYSGRFTC | K360E/K409W |
| | WWLTTISTDL TFSVKSSRGS SDPQGVTCGA | Substitution for |
| | ATLSAERVRG DNKEYEYSVE CQEDSACPAA | stabilizing disulfide |
| | EESLPIEVMV DAVHKLKYEN YTSSFFIRDI | bond: Y349C |
| | IKPDPPKNLQ LKPLKNSRQV EVSWEYPDTW | Substitutions for |
| | STPHSYFSLT FCVQVQGKSK REKKDRVFTD | reducing FcγR binding: |
| | KTSATVICRK NASISVRAQD RYYSSSWSEW | L234A, L235A, P329A |
| | ASVPCSEPKS SDKTHTCPPC PAPEAAGGPS | C220 in the upper hinge |
| | VFLFPPKPKD TLMISRTPEVTCVVVDVSHE | is mutated to S |
| | DPEVKFNWYV DGVEVHNAKT KPREEQYNST | |
| | YRVVSVLTVL HQDWLNGKEYKCKVSNKALA | |
| | APIEKTISKA KGQPREPQVC TLPPSRDELT | |
| | ENQVSLTCLV KGFYPSDIAV EWESNGQPEN | |
| | NYKTTPPVLD SDGSFFLYSWLTVDKSRWQQ | |
| | GNVFSCSVMH EALHNHYTQK SLSLSPG | |
| GGGGSGGG | (SEQ ID NO: 32) | IgG1FcSilent |
| GSGGGGSEP | RNLPVATPDP GMFPCLHHSQ NLLRAVSNML | (IL-12 p35) |
| KSSDKTHTC | QKARQTLEFY PCTSEEIDHV DITKDKTSTV | Heterodimerization |
| PPCPAPEAA | EACLPLELTK NESCLNSRET SFITNGSCLA | mutations: |
| GG (SEQ ID | SRKTSFMMAL CLSSIYEDLK MYQVEFKTMN | Q347R/D399V/F405T |
| NO: 10) | AKLLMDPKRQ IFLDQNMLAV IDELMQALNF | Substitution for |
| | NSETVPQKSS LEEPDFYKTK IKLCILLHAF | stabilizing disulfide |
| | RIRAVTIDRV MSYLNASGGG GSGGGGSGGG | bond: S354C |
| | GSEPKSSDKT HTCPPCPAPE AAGGPSVFLF | Substitutions for |
| | PPKPKDTLMISRTPEVTCVV VDVSHEDPEV | reducing FcγR binding: |
| | KFNWYVDGVE VHNAKTKPRE EQYNSTYRVV | L234A, L235A, P329A |
| | SVLTVLHQDW LNGKEYKCKV SNKALAAPIE | C220 in the upper hinge |
| | KTISKAKGQP REPRVYTLPP CRDELTKNQV | is mutated to S |
| | SLTCLVKGFY PSDIAVEWES NGQPENNYKT | |
| | TPPVLVSDGS FTLYSKLTVD KSRWQQGNVF | |
| | SCSVMHEALH NHYTQKSLSL SPG | |

Construct 9

| | | |
|---|---|---|
| EPKSSDKTH | (SEQ ID NO: 3) | IgG1FcSilent |
| TCPPCPAPEA | IWELKKDVYV VELDWYPDAP GEMVVLTCDT | (IL-12 p40) |
| AGG (SEQ ID | PEEDGITWTL DQSSEVLGSG KTLTIRVKEF | Heterodimerization |
| NO: 9) | GDAGQYTCHK GGEVLSHSLL LLHKKEDGIW | mutations: |
| | STDILKDQKE PKNKTFLRCE AKNYSGRFTC | K360E/K409W |
| | WWLTTISTDL TFSVKSSRGS SDPQGVTCGA | Substitution for |
| | ATLSAERVRG DNKEYEYSVE CQEDSACPAA | stabilizing disulfide |
| | EESLPIEVMV DAVHKLKYEN YTSSFFIRDI | bond: Y349C |
| | IKPDPPKNLQ LKPLKNSRQV EVSWEYPDTW | Substitutions for |
| | STPHSYFSLT FCVQVQGKSK REKKDRVFTD | reducing FcγR binding: |
| | KTSATVICRK NASISVRAQD RYYSSSWSEW | L234A/L235A/P329G |
| | ASVPCSEPKS SDKTHTCPPC PAPEAAGGPS | C220 in the upper hinge |
| | VFLFPPKPKD TLMISRTPEVTCVVVDVSHE | is mutated to S |
| | DPEVKFNWYV DGVEVHNAKT KPREEQYNST | |
| | YRVVSVLTVLHQDWLNGKEY KCKVSNKALG | |
| | APIEKTTSKA KGQPREPQVC | |
| | TLPPSRDELTENQVSLTCLV KGFYPSDIAV | |
| | EWESNGQPEN NYKTTPPVLD | |
| | SDGSFFLYSWLTVDKSRWQQ GNVFSCSVMH | |
| | EALHNHYTQK SLSLSPG | |
| GGGGSGGG | (SEQ ID NO: 34) | IgG1FcSilent |
| GSGGGGSEP | RNLPVATPDP GMFPCLHHSQ NLLRAVSNML | (IL-12 p35) |
| KSSDKTHTC | QKARQTLEFY PCTSEEIDHV DITKDKTSTV | Heterodimerization |
| PPCPAPEAA | EACLPLELTK NESCLNSRET SFITNGSCLA | mutations: |
| GG (SEQ ID | SRKTSFMMAL CLSSIYEDLK MYQVEFKTMN | Q347R/D399V/F405T |
| NO: 10) | AKLLMDPKRQ IFLDQNMLAV IDELMQALNF | Substitution for |
| | NSETVPQKSS LEEPDFYKTK IKLCILLHAF | stabilizing disulfide |
| | RIRAVTIDRV MSYLNASGGG GSGGGGSGGG | bond: S354C |
| | GSEPKSSDKT HTCPPCPAPE AAGGPSVFLF | Substitutions for |
| | PPKPKDTLMI SRTPEVTCVV VDVSHEDPEV | reducing FcγR binding: |
| | KFNWYVDGVE VHNAKTKPRE EQYNSTYRVV | L234A, L235A, P329G |
| | SVLTVLHQDW LNGKEYKCKV SNKALGAPIE | C220 in the upper hinge |
| | KTISKAKGQP REPRVYTLPPCRDELTKNQV | is mutated to S |
| | SLTCLVKGFY PSDIAVEWES NGQPENNYKT | |
| | TPPVLVSDGS FTLYSKLTVD KSRWQQGNVF | |
| | SCSVMHEALH NHYTQKSLSL SPG | |

Construct 10

| | | |
|---|---|---|
| EPKSSDKTH | (SEQ ID NO: 35) | IgG1 Fc |
| TCPPCPAPEA | IWELKKDVYV VELDWYPDAP GEMVVLTCDT | (IL-12 p40) |
| EGA (SEQ ID | PEEDGITWTL DQSSEVLGSG KTLTIRVKEF | Heterodimerization |
| NO: 11) | GDAGQYTCHK GGEVLSHSLL LLHKKEDGIW | mutations: |
| | STDILKDQKE PKNKTFLRCE AKNYSGRFTC | K360E/K409W |
| | WWLTTISTDL TFSVKSSRGS SDPQGVTCGA | Substitution for |
| | ATLSAERVRG DNKEYEYSVE CQEDSACPAA | stabilizing disulfide |
| | EESLPIEVMV DAVHKLKYEN YTSSFFIRDI | bond: Y349C |
| | IKPDPPKNLQ LKPLKNSRQV EVSWEYPDTW | Substitutions for |
| | STPHSYFSLT FCVQVQGKSK REKKDRVFTD | reducing FcγR and C1q |
| | KTSATVICRK NASISVRAQD RYYSSSWSEW | binding: L234A, |
| | ASVPCSEPKS SDKTHTCPPC PAPEAEGAPS | L235E, G237A, |
| | VFLFPPKPKD TLMISRTPEV TCVVVDVSHE | A330S, P331S |
| | DPEVKFNWYV DGVEVHNAKT KPREEQYNST | |
| | YRVVSVLTVL HQDWLNGKEY KCKVSNKALP | |
| | SSIEKTISKA KGQPREPQVC TLPPSRDELT | |
| | ENQVSLTCLV KGFYPSDIAV EWESNGQPEN | |
| | NYKTTPPVLD SDGSFFLYSW LTVDKSRWQQ | |
| | GNVFSCSVMH EALHNHYTQK SLSLSPG | |
| GGGGSGGG | (SEQ ID NO: 36) | IgG1 Fc |
| GSGGGGSEP | RNLPVATPDP GMFPCLHHSQ NLLRAVSNML | (IL-12 p35) |
| KSSDKTHTC | QKARQTLEFY PCTSEEIDHV DITKDKTSTV | Heterodimerization |
| PPCPAPEAEG | EACLPLELTK NESCLNSRET SFITNGSCLA | mutations: |
| A (SEQ ID | SRKTSFMMAL CLSSIYEDLK MYQVEFKTMN | Q347R/D399V/F405T |
| NO: 12) | AKLLMDPKRQ IFLDQNMLAV IDELMQALNF | Substitution for |
| | NSETVPQKSS LEEPDFYKTK IKLCILLHAF | stabilizing disulfide |
| | RIRAVTIDRV MSYLNASGGGGSGGGGSGGG | bond: S354C |
| | GSEPKSSDKT HTCPPCPAPE AEGAPSVFLF | Substitutions for |
| | PPKPKDTLMISRTPEVTCVV VDVSHEDPEV | reducing FcγR and C1q |
| | KFNWYVDGVE VHNAKTKPRE EQYNSTYRVV | binding: L234A, |
| | SVLTVLHQDW LNGKEYKCKV SNKALPSSIE | L235E, G237A, |
| | KTISKAKGQP REPRVYTLPP CRDELTKNQV | A330S, P331S |
| | SLTCLVKGFY PSDIAVEWES NGQPENNYKT | |
| | TPPVLVSDGS FTLYSKLTVD KSRWQQGNVF | |
| | SCSVMHEALH NHYTQKSLSL SPG | |

Construct 11

| | | |
|---|---|---|
| RVESKYGPP | (SEQ ID NO: 37) | IgG4 Fc |
| CPPCPAPEFL | IWELKKDVYV VELDWYPDAP GEMVVLTCDT | (IL-12 p40) |
| GG (SEQ ID | PEEDGITWTL DQSSEVLGSG KTLTIRVKEF | Heterodimerization |
| NO:2) | GDAGQYTCHK GGEVLSHSLL LLHKKEDGIW | mutations: |
| | STDILKDQKE PKNKTFLRCE AKNYSGRFTC | K370E/R409W |
| | WWLTTISTDL TFSVKSSRGS SDPQGVTCGA | Substitution for |
| | ATLSAERVRG DNKEYEYSVE CQEDSACPAA | stabilizing disulfide |
| | EESLPIEVMV DAVHKLKYEN YTSSFFIRDI | bond: Y349C |
| | IKPDPPKNLQ LKPLKNSRQV EVSWEYPDTW | Substitution for |
| | STPHSYFSLT FCVQVQGKSK REKKDRVFTD | preventing Fab-Arm |
| | KTSATVICRK NASISVRAQD RYYSSSWSEW | exchange and |
| | ASVPCSRVES KYGPPCPPCP APEFLGGPSV | improving |
| | FLFPPKPKDT LMISRTPEVT CVVVDVSQED | thermostability: S228P |
| | PEVQFNWYVD GVEVHNAKTK PREEQFNSTY | |
| | RVVSVLTVLH QDWLNGKEYK CKVSNKGLPS | |
| | SIEKTISKAK GQPREPQVCT LPPSQEEMTK | |
| | NQVSLTCLVE GFYPSDIAVE WESNGQPENN | |
| | YKTTPPVLDS DGSFFLYSWL TVDKSRWQEG | |
| | NVFSCSVMHE ALHNHYTQKS LSLSLG | |
| RVESKYGPP | (SEQ ID NO: 38) | IgG4 Fc |
| CPPCPAPEFL | RNLPVATPDP GMFPCLHHSQ NLLRAVSNML | (IL-12 p35) |
| GG (SEQ ID | QKARQTLEFY PCTSEEIDHV DITKDKTSTV | Heterodimerization |
| NO: 2) | EACLPLELTK NESCLNSRET SFITNGSCLA | mutations: |
| | SRKTSFMMAL CLSSIYEDLK MYQVEFKTMN | E357N/D399V/F405T |
| | AKLLMDPKRQ IFLDQNMLAV IDELMQALNF | Substitution for |
| | NSETVPQKSS LEEPDFYKTK IKLCILLHAF | stabilizing disulfide |
| | RIRAVTIDRVMSYLNASRVESKYGPPCPPC | bond: S354C |
| | PAPEFLGGPSVFLFPPKPKDTLMISRTPEVTCV | Substitution for |
| | VVDVSQEDPEVQFNWYV DGVEVHNAKT | preventing Fab-Arm |
| | KPREEQFNST YRVVSVLTVL HQDWLNGKEY | exchange and |
| | KCKVSNKGLPSSIEKTISKAKGQPREPQVYTLP | improving |
| | PCQENMT KNQVSLTCLVKGFYPSDIAV | thermostability: S228P |
| | EWESNGQPEN NYKTTPPVLV SDGSFTLYSR | |
| | LTVDKSRWQEGNVFSCSVMH EALHNHYTQK | |
| | SLSLSLG | |

Construct 12

| | | |
|---|---|---|
| RVESKYGPP | (SEQ ID NO: 39) | IgG4 Fc |
| CPPCPAPEFL | IWELKKDVYV VELDWYPDAP GEMVVLTCDT | (IL-12 p40) |
| GG (SEQ ID | PEEDGITWTL DQSSEVLGSG KTLTIRVKEF | Heterodimerization |
| NO: 2) | GDAGQYTCHK GGEVLSHSLL LLHKKEDGIW | mutations: |
| | STDILKDQKE PKNKTFLRCE AKNYSGRFTC | K370E/R409W |
| | WWLTTISTDL TFSVKSSRGS SDPQGVTCGA | Substitution for |
| | ATLSAERVRG DNKEYEYSVE CQEDSACPAA | stabilizing disulfide |
| | EESLPIEVMV DAVHKLKYEN YTSSFFIRDI | bond: Y349C |
| | IKPDPPKNLQ LKPLKNSRQV EVSWEYPDTW | Substitution for |
| | STPHSYFSLT FCVQVQGKSK REKKDRVFTD | preventing Fab-Arm |
| | KTSATVICRK NASISVRAQD RYYSSSWSEW | exchange and |
| | ASVPCSRVES KYGPPCPPCP APEFLGGPSV | improving |
| | FLFPPKPKDT LMISRTPEVT CVVVDVSQED | thermostability: S228P |
| | PEVQFNWYVD GVEVHNAKTK PREEQFNSTY | |
| | RVVSVLTVLH QDWLNGKEYK CKVSNKGLPS | |
| | SIEKTISKAK GQPREPQVCT LPPSQEEMTK | |
| | NQVSLTCLVE GFYPSDIAVE WESNGQPENN | |
| | YKTTPPVLDS DGSFFLYSWL TVDKSRWQEG | |
| | NVFSCSVMHE ALHNHYTQKS LSLSLG | |
| GGGGSRVES | (SEQ ID NO: 40) | IgG4 Fc |
| KYGPPCPPCP | RNLPVATPDP GMFPCLHHSQ NLLRAVSNML | (IL-12 p35) |
| APEFLGG | QKARQTLEFY PCTSEEIDHV DITKDKTSTV | Heterodimerization |
| (SEQ ID | EACLPLELTK NESCLNSRET SFITNGSCLA | mutations: |
| NO: 13) | SRKTSFMMAL CLSSIYEDLK MYQVEFKTMN | E357N/D399V/F405T |
| | AKLLMDPKRQ IFLDQNMLAV IDELMQALNF | Substitution for |
| | NSETVPQKSS LEEPDFYKTK IKLCILLHAF | stabilizing disulfide |
| | RIRAVTIDRV MSYLNASGGG GSRVESKYGP | bond: S354C |
| | PCPPCPAPEF LGGPSVFLFP PKPKDTLMIS | Substitution for |
| | RTPEVTCVVV DVSQEDPEVQ FNWYVDGVEV | preventing Fab-Arm |
| | HNAKTKPREE QFNSTYRVVS VLTVLHQDWL | exchange and |
| | NGKEYKCKVS NKGLPSSIEK TISKAKGQPR | improving |
| | EPQVYTLPPC QENMTKNQVS LTCLVKGFYP | thermostability: S228P |
| | SDIAVEWESN GQPENNYKTT PPVLVSDGSF | |
| | TLYSRLTVDK SRWQEGNVFS CSVMHEALHN | |
| | HYTQKSLSLS LG | |

Construct 13

| | | |
|---|---|---|
| RVESKYGPP | (SEQ ID NO: 41) | IgG4 Fc |
| CPPCPAPEFL | IWELKKDVYV VELDWYPDAP GEMVVLTCDT | (IL-12 p40) |
| GG (SEQ ID | PEEDGITWTL DQSSEVLGSG KTLTIRVKEF | Heterodimerization |
| NO: 2) | GDAGQYTCHK GGEVLSHSLL LLHKKEDGIW | mutations: |
| | STDILKDQKE PKNKTFLRCE AKNYSGRFTC | K370E/R409W |
| | WWLTTISTDL TFSVKSSRGS SDPQGVTCGA | Substitution for |
| | ATLSAERVRG DNKEYEYSVE CQEDSACPAA | stabilizing disulfide |
| | EESLPIEVMV DAVHKLKYEN YTSSFFIRDI | bond: Y349C |
| | IKPDPPKNLQ LKPLKNSRQV EVSWEYPDTW | Substitution for |
| | STPHSYFSLT FCVQVQGKSK REKKDRVFTD | preventing Fab-Arm |
| | KTSATVICRK NASISVRAQD RYYSSSWSEW | exchange and |
| | ASVPCSRVES KYGPPCPPCP APEFLGGPSV | improving |
| | FLFPPKPKDT LMISRTPEVT CVVVDVSQED | thermostability: S228P |
| | PEVQFNWYVD GVEVHNAKTK PREEQFNSTY | |
| | RVVSVLTVLH QDWLNGKEYK CKVSNKGLPS | |
| | SIEKTISKAK GQPREPQVCT LPPSQEEMTK | |
| | NQVSLTCLVE GFYPSDIAVE WESNGQPENN | |
| | YKTTPPVLDS DGSFFLYSWL TVDKSRWQEG | |
| | NVFSCSVMHE ALHNHYTQKS LSLSLG | |
| GGGGSGGG | (SEQ ID NO: 42) | IgG4 Fc |
| GSRVESKYG | RNLPVATPDP GMFPCLHHSQ NLLRAVSNML | (IL-12 p35) |
| PPCPPCPAPE | QKARQTLEFY PCTSEEIDHV DITKDKTSTV | Heterodimerization |
| FLGG (SEQ | EACLPLELTK NESCLNSRET SFITNGSCLA | mutations: |
| ID NO: 14) | SRKTSFMMAL CLSSIYEDLK MYQVEFKTMN | E357N/D399V/F405T |
| | AKLLMDPKRQ IFLDQNMLAV IDELMQALNF | Substitution for |
| | NSETVPQKSS LEEPDFYKTK IKLCILLHAF | stabilizing disulfide |
| | RIRAVTIDRV MSYLNASGGGGSGGGGSRVE | bond: S354C |
| | SKYGPPCPPC PAPEFLGGPS VFLFPPKPKD | Substitution for |
| | TLMISRTPEVTCVVVDVSQE DPEVQFNWYV | preventing Fab-Arm |
| | DGVEVHNAKT KPREEQFNST YRVVSVLTVL | exchange and |
| | HQDWLNGKEYKCKVSNKGLPSSIEKTISKA | improving |
| | KGQPREPQVYTLPPCQENMTKNQVSLTCLV | thermostability: |
| | KGFYPSDIAVEWESNGQPEN NYKTTPPVLV | S228P |
| | SDGSFTLYSRLTVDKSRWQE GNVFSCSVMH | |
| | EALHNHYTQK SLSLSLG | |

Construct 14

| | | |
|---|---|---|
| EPKSSDKTH | (SEQ ID NO: 43) | IgG1 Fc |
| TCPPCPAPEL | IWELKKDVYV VELDWYPDAP GEMVVLTCDT | (IL-12 p40) |
| LGG (SEQ ID | PEEDGITWTL DQSSEVLGSG KTLTIRVKEF | Heterodimerization |
| NO: 7) | GDAGQYTCHK GGEVLSHSLL LLHKKEDGIW | mutations: |
| | STDILKDQKE PKNKTFLRCE AKNYSGRFTC | K360E/K409W |
| | WWLTTISTDL TFSVKSSRGS SDPQGVTCGA | Substitution for |
| | ATLSAERVRG DNKEYEYSVE CQEDSACPAA | stabilizing disulfide |
| | EESLPIEVMV DAVHKLKYEN YTSSFFIRDI | bond: Y349C |
| | IKPDPPKNLQ LKPLKNSRQV EVSWEYPDTW | C220 in the upper hinge |
| | STPHSYFSLT FCVQVQGKSK REKKDRVFTD | is mutated to S |
| | KTSATVICRK NASISVRAQD RYYSSSWSEW | |
| | ASVPCSEPKS SDKTHTCPPC PAPELLGGPS | |
| | VFLFPPKPKD TLMISRTPEVTCVVVDVSHE | |
| | DPEVKFNWYV DGVEVHNAKT KPREEQYNST | |
| | YRVVSVLTVLHQDWLNGKEY KCKVSNKALP | |
| | APIEKTISKA KGQPREPQVC TLPPSRDELT | |
| | ENQVSLTCLV KGFYPSDIAV EWESNGQPEN | |
| | NYKTTPPVLD SDGSFFLYSWLTVDKSRWQQ | |
| | GNVFSCSVMH EALHNHYTQK SLSLSPG | |
| EPKSSDKTH | (SEQ ID NO: 44) | IgG1 Fc |
| TCPPCPAPEL | RNLPVATPDP GMFPCLHHSQ NLLRAVSNML | (IL-12 p35) |
| LGG (SEQ ID | QKARQTLEFY PCTSEEIDHV DITKDKTSTV | Heterodimerization |
| NO: 7) | EACLPLELTK NESCLNSRET SFITNGSCLA | mutations: |
| | SRKTSFMMAL CLSSIYEDLK MYQVEFKTMN | Q347R/D399V/F405T |
| | AKLLMDPKRQ IFLDQNMLAV IDELMQALNF | Substitution for |
| | NSETVPQKSS LEEPDFYKTK IKLCILLHAF | stabilizing disulfide |
| | RIRAVTIDRV MSYLNASEPKSSDKTHTCPP | bond: S354C |
| | CPAPELLGGP SVFLFPPKPK DTLMISRTPE | C220 in the upper hinge |
| | VTCVVVDVSH EDPEVKFNWYVDGVEVHNAK | is mutated to S |
| | TKPREEQYNS TYRVVSVLTV LHQDWLNGKE | |
| | YKCKVSNKALPAPIEKTISKAKGQPREPRVYTL | |
| | PPCRDELTKNQVSLTCLVKGFYPSDIAVEWES | |
| | NGQPENNYKTTPPVLVSDGSFTLYSKLTVDKS | |
| | RWQQGNVFSCSVM HEALHNHYTQ | |
| | KSLSLSPG | |

Construct 15

| | | |
|---|---|---|
| EPKSSDKTH | (SEQ ID NO: 45) | IgG1 Fc |
| TCPPCPAPEL | IWELKKDVYV VELDWYPDAP GEMVVLTCDT | (IL-12 p40) |
| LGG (SEQ ID | PEEDGITWTL DQSSEVLGSG KTLTIRVKEF | Heterodimerization |
| NO: 7) | GDAGQYTCHK GGEVLSHSLL LLHKKEDGIW | mutations: |
| | STDILKDQKE PKNKTFLRCE AKNYSGRFTC | K360E/K409W |
| | WWLTTISTDL TFSVKSSRGS SDPQGVTCGA | Substitution for |
| | ATLSAERVRG DNKEYEYSVE CQEDSACPAA | stabilizing disulfide |
| | EESLPIEVMV DAVHKLKYEN YTSSFFIRDI | bond: Y349C |
| | IKPDPPKNLQ LKPLKNSRQV EVSWEYPDTW | C220 in the upper hinge |
| | STPHSYFSLT FCVQVQGKSK REKKDRVFTD | is mutated to S |
| | KTSATVICRK NASISVRAQD RYYSSSWSEW | |
| | ASVPCSEPKS SDKTHTCPPC PAPELLGGPS | |
| | VFLFPPKPKD TLMISRTPEVTCVVVDVSHE | |
| | DPEVKFNWYV DGVEVHNAKT KPREEQYNST | |
| | YRVVSVLTVLHQDWLNGKEY KCKVSNKALP | |
| | APIEKTISKA KGQPREPQVCTLPPSRDELT | |
| | ENQVSLTCLV KGFYPSDIAV EWESNGQPEN | |
| | NYKTTPPVLD SDGSFFLYSWLTVDKSRWQQ | |
| | GNVFSCSVMH EALHNHYTQK SLSLSPG | |
| GGGGSEPKS | (SEQ ID NO: 46) | IgG1 Fc |
| SDKTHTCPP | RNLPVATPDP GMFPCLHHSQ NLLRAVSNML | (IL-12 p35) |
| CPAPE LLGG | QKARQTLEFY PCTSEEIDHV DITKDKTSTV | Heterodimerization |
| (SEQ ID | EACLPLELTK NESCLNSRET SFITNGSCLA | mutations: |
| NO: 15) | SRKTSFMMAL CLSSIYEDLK MYQVEFKTMN | Q347R, D399V/F405T |
| | AKLLMDPKRQ IFLDQNMLAV IDELMQALNF | Substitution for |
| | NSETVPQKSS LEEPDFYKTK IKLCILLHAF | stabilizing disulfide |
| | RIRAVTIDRV MSYLNASGGGGSEPKSSDKT | bond: S354C |
| | HTCPPCPAPE LLGGPSVFLF PPKPKDTLMI | C220 in the upper hinge |
| | SRTPEVTCVV VDVSHEDPEV KFNWYVDGVE | is mutated to S |
| | VHNAKTKPRE EQYNSTYRVV SVLTVLHQDW | |
| | LNGKEYKCKV SNKALPAPIE KTISKAKGQP | |
| | REPRVYTLPP CRDELTKNQV SLTCLVKGFY | |
| | PSDIAVEWES NGQPENNYKT TPPVLVSDGS | |
| | FTLYSKLTVD KSRWQQGNVF SCSVMHEALH | |
| | NHYTQKSLSL SPG | |

Construct 16

| | | |
|---|---|---|
| EPKSSDKTH | (SEQ ID NO: 47) | IgG1 Fc |
| TCPPCPAPEL | IWELKKDVYV VELDWYPDAP GEMVVLTCDT | (IL-12 p40) |
| LGG (SEQ ID | PEEDGITWTL DQSSEVLGSG KTLTIRVKEF | Heterodimerization |
| NO: 7) | GDAGQYTCHK GGEVLSHSLL LLHKKEDGIW | mutations: |
| | STDILKDQKE PKNKTFLRCE AKNYSGRFTC | K360E/K409W |
| | WWLTTISTDL TFSVKSSRGS SDPQGVTCGA | Substitution for |
| | ATLSAERVRG DNKEYEYSVE CQEDSACPAA | stabilizing disulfide |
| | EESLPIEVMV DAVHKLKYEN YTSSFFIRDI | bond: Y349C |
| | IKPDPPKNLQ LKPLKNSRQV EVSWEYPDTW | C220 in the upper hinge |
| | STPHSYFSLT FCVQVQGKSK REKKDRVFTD | is mutated to S |
| | KTSATVICRK NASISVRAQD RYYSSSWSEW | |
| | ASVPCSEPKS SDKTHTCPPC PAPELLGGPS | |
| | VFLFPPKPKD TLMISRTPEVTCVVVDVSHE | |
| | DPEVKFNWYV DGVEVHNAKT KPREEQYNST | |
| | YRVVSVLTVLHQDWLNGKEY KCKVSNKALP | |
| | APIEKTISKA KGQPREPQVC TLPPSRDELT | |
| | ENQVSLTCLV KGFYPSDIAV EWESNGQPEN | |
| | NYKTTPPVLD SDGSFFLYSWLTVDKSRWQQ | |
| | GNVFSCSVMH EALHNHYTQK SLSLSPG | |
| GGGGSGGG | (SEQ ID NO: 48) | IgG1 Fc |
| GSEPKSSDK | RNLPVATPDP GMFPCLHHSQ NLLRAVSNML | (IL-12 p35) |
| THTCPPCPAP | QKARQTLEFY PCTSEEIDHV DITKDKTSTV | Heterodimerization |
| ELLGG (SEQ | EACLPLELTK NESCLNSRET SFITNGSCLA | mutations: |
| ID NO: 16) | SRKTSFMMAL CLSSIYEDLK MYQVEFKTMN | Q347R/D399V/F405T |
| | AKLLMDPKRQ IFLDQNMLAV IDELMQALNF | Substitution for |
| | NSETVPQKSS LEEPDFYKTK IKLCILLHAF | stabilizing disulfide |
| | RIRAVTIDRVMSYLNASGGG GSGGGGSEPK | bond: S354C |
| | SSDKTHTCPPCPAPELLGGP SVFLFPPKPK | C220 in the upper hinge |
| | DTLMISRTPEVTCVVVDVSH EDPEVKFNWY | is mutated to S |
| | VDGVEVHNAK TKPREEQYNS TYRVVSVLTV | |
| | LHQDWLNGKE YKCKVSNKAL PAPIEKTISK | |
| | AKGQPREPRV YTLPPCRDELTKNQVSLTCL | |
| | VKGFYPSDIA VEWESNGQPE NNYKTTPPVL | |
| | VSDGSFTLYSKLTVDKSRWQ QGNVFSCSVM | |
| | HEALHNHYTQ KSLSLSPG | |

Construct 17

| | | |
|---|---|---|
| GGGGSGGG | (SEQ ID NO: 49) | IgG1 Fc |
| GSGGGGSEP | RNLPVATPDP GMFPCLHHSQ NLLRAVSNML | (IL-12 p35) |
| KSSDKTHTC | QKARQTLEFY PCTSEEIDHV DITKDKTSTV | Heterodimerization |
| PPCPAPELLG | EACLPLELTK NESCLNSRET SFITNGSCLA | mutations: |
| G(SEQ ID | SRKTSFMMAL CLSSIYEDLK MYQVEFKTMN | K360E/K409W |
| NO: 8) | AKLLMDPKRQ IFLDQNMLAV IDELMQALNF | Substitution for |
| | NSETVPQKSS LEEPDFYKTK IKLCILLHAF | stabilizing disulfide |
| | RIRAVTIDRV MSYLNASGGG GSGGGGSGGG | bond: Y349C |
| | GSEPKSSDKT HTCPPCPAPE LLGGPSVFLF | C220 in the upper hinge |
| | PPKPKDTLMI SRTPEVTCVV VDVSHEDPEV | is mutated to S |
| | KFNWYVDGVE VHNAKTKPRE EQYNSTYRVV | |
| | SVLTVLHQDW LNGKEYKCKV SNKALPAPIE | |
| | KTISKAKGQP REPQVCTLPPSRDELTENQV | |
| | SLTCLVKGFY PSDIAVEWES NGQPENNYKT | |
| | TPPVLDSDGS FFLYSWLTVD KSRWQQGNVF | |
| | SCSVMHEALH NHYTQKSLSL SPG | |
| EPKSSDKTH | (SEQ ID NO: 50) | IgG1 Fc |
| TCPPCPAPEL | IWELKKDVYV VELDWYPDAP GEMVVLTCDT | (IL-12 p40) |
| LGG (SEQ ID | PEEDGITWTL DQSSEVLGSG KTLTIRVKEF | Heterodimerization |
| NO: 7) | GDAGQYTCHK GGEVLSHSLL LLHKKEDGIW | mutations: |
| | STDILKDQKE PKNKTFLRCE AKNYSGRFTC | Q347R/D399V/F405T |
| | WWLTTISTDL TFSVKSSRGS SDPQGVTCGA | Substitution for |
| | ATLSAERVRG DNKEYEYSVE CQEDSACPAA | stabilizing disulfide |
| | EESLPIEVMV DAVHKLKYEN YTSSFFIRDI | bond: S354C |
| | IKPDPPKNLQ LKPLKNSRQV EVSWEYPDTW | C220 in the upper hinge |
| | STPHSYFSLT FCVQVQGKSK REKKDRVFTD | is mutated to S |
| | KTSATVICRK NASISVRAQD RYYSSSWSEW | |
| | ASVPCSEPKS SDKTHTCPPC PAPELLGGPS | |
| | VFLFPPKPKD TLMISRTPEV TCVVVDVSHE | |
| | DPEVKFNWYV DGVEVHNAKT KPREEQYNST | |
| | YRVVSVLTVL HQDWLNGKEY KCKVSNKALP | |
| | APIEKTISKA KGQPREPRVY TLPPCRDELT | |
| | KNQVSLTCLV KGFYPSDIAV EWESNGQPEN | |
| | NYKTTPPVLV SDGSFTLYSK LTVDKSRWQQ | |
| | GNVFSCSVMH EALHNHYTQK SLSLSPG | |

Construct 18

| | | |
|---|---|---|
| GGGGSEPKS | (SEQ ID NO: 51) | IgG1 (IL-12 p40) |
| SDKTHTCPP | IWELKKDVYV VELDWYPDAP GEMVVLTCDT | Heterodimerization |
| CPAPELLGG | PEEDGITWTL DQSSEVLGSG KTLTIRVKEF | mutations: |
| (SEQ ID | GDAGQYTCHK GGEVLSHSLL LLHKKEDGIW | K360E/K409W |
| NO: 15) | STDILKDQKE PKNKTFLRCE AKNYSGRFTC | Substitution for |
| | WWLTTISTDL TFSVKSSRGS SDPQGVTCGA | stabilizing disulfide |
| | ATLSAERVRG DNKEYEYSVE CQEDSACPAA | bond: Y349C |
| | EESLPIEVMV DAVHKLKYEN YTSSFFIRDI | C220 in the upper hinge |
| | IKPDPPKNLQ LKPLKNSRQV EVSWEYPDTW | is mutated to S |
| | STPHSYFSLT FCVQVQGKSK REKKDRVFTD | |
| | KTSATVICRK NASISVRAQD RYYSSSWSEW | |
| | ASVPCSGGGG SEPKSSDKTH TCPPCPAPEL | |
| | LGGPSVFLFP PKPKDTLMIS RTPEVTCVVV | |
| | DVSHEDPEVK FNWYVDGVEV HNAKTKPREE | |
| | QYNSTYRVVS VLTVLHQDWL NGKEYKCKVS | |
| | NKALPAPIEK TISKAKGQPR EPQVCTLPPS | |
| | RDELTENQVS LTCLVKGFYP SDIAVEWESN | |
| | GQPENNYKTT PPVLDSDGSF FLYSWLTVDK | |
| | SRWQQGNVFS CSVMHEALHN HYTQKSLSLS | |
| | PG | |
| GGGGSEPKS | (SEQ ID NO: 52) | IgG1 (IL-12 p35) |
| SDKTHTCPP | RNLPVATPDP GMFPCLHHSQ NLLRAVSNML | Heterodimerization |
| CPAPELLGG | QKARQTLEFY PCTSEEIDHV DITKDKTSTV | mutations: |
| (SEQ ID | EACLPLELTK NESCLNSRET SFITNGSCLA | Q347R/D399V/F405T |
| NO: 15) | SRKTSFMMAL CLSSIYEDLK MYQVEFKTMN | Substitution for |
| | AKLLMDPKRQ IFLDQNMLAV IDELMQALNF | stabilizing disulfide |
| | NSETVPQKSS LEEPDFYKTK IKLCILLHAF | bond: S354C |
| | RIRAVTIDRV MSYLNAS GGG GSEPKSSDKT | C220 in the upper hinge |
| | HTCPPCPAPE LLGGPSVFLF PPKPKDTLMI | is mutated to S |
| | SRTPEVTCVV VDVSHEDPEV KFNWYVDGVE | |
| | VHNAKTKPRE EQYNSTYRVV SVLTVLHQDW | |
| | LNGKEYKCKV SNKALPAPIE KTISKAKGQP | |
| | REPRVYTLPP CRDELTKNQV SLTCLVKGFY | |
| | PSDIAVEWES NGQPENNYKT TPPVLVSDGS | |
| | FTLYSKLTVD KSRWQQGNVF SCSVMHEALH | |
| | NHYTQKSLSL SPG | |

Construct 19

| | | |
|---|---|---|
| GGGGSEPKS | (SEQ ID NO: 53) | IgG1 (IL-12 p40) |
| SDKTHTCPP | IWELKKDVYV VELDWYPDAP GEMVVLTCDT | Heterodimerization |
| CPAPE LLGG | PEEDGITWTL DQSSEVLGSG KTLTIRVKEF | mutations: |
| (SEQ ID | GDAGQYTCHK GGEVLSHSLL LLHKKEDGIW | K360E/K409W |
| NO: 15) | STDILKDQKE PKNKTFLRCE AKNYSGRFTC | p40 substitutions: |
| | WWLTTISTDL TFSVKSSRGS SDPQGVTCGA | C177S, Y292C |
| | ATLSAERVRG DNKEYEYSVE CQEDSASPAA | (native disulfide bond |
| | EESLPIEVMV DAVHKLKYEN YTSSFFIRDI | between subunits is |
| | IKPDPPKNLQ LKPLKNSRQV EVSWEYPDTW | deleted) |
| | STPHSYFSLT FCVQVQGKSK REKKDRVFTD | |
| | KTSATVICRK NASISVRAQD RCYSSSWSEW | |
| | ASVPCS GGGG SEPKSSDKTH TCPPCPAPEL | |
| | LGGPSVFLFP PKPKDTLMIS RTPEVTCVVV | |
| | DVSHEDPEVK FNWYVDGVEV HNAKTKPREE | |
| | QYNSTYRVVS VLTVLHQDWL NGKEYKCKVS | |
| | NKALPAPIEK TISKAKGQPR EPQVCTLPPS | |
| | RDELTENQVS LTCLVKGFYP SDIAVEWESN | |
| | GQPENNYKTT PPVLDSDGSF FLYSWLTVDK | |
| | SRWQQGNVFS CSVMHEALHN HYTQKSLSLS | |
| | PG | |
| GGGGSEPKS | (SEQ ID NO: 54) | IgG1 (IL-12 p35) |
| SDKTHTCPP | RNLPVATPDP GMFPCLHHSQ NLLRAVSNML | Heterodimerization |
| CPAPE LLGG | QKARQTLEFY PCTSEEIDHV DITKDKTSTV | mutations: |
| (SEQ ID | EACLPLELTK NESSLNSRET SFITNGSCLA | Q347R/D399V/F405T |
| NO: 15) | SRKTSFMMAL CLSSIYEDLK MYQVEFKTMN | p35 substitutions: C74S |
| | AKLLMDPKRQ IFLDQNMLAV IDELMQALNF | V185C |
| | NSETVPQKSS LEEPDFYKTK IKLCILLHAF | (native disulfide bond |
| | RIRACTIDRV MSYLNASGGGGSEPKSSDKT | between subunits is |
| | HTCPPCPAPE LLGGPSVFLF PPKPKDTLMI | deleted) |
| | SRTPEVTCVV VDVSHEDPEV KFNWYVDGVE | |
| | VHNAKTKPRE EQYNSTYRVV SVLTVLHQDW | |
| | LNGKEYKCKV SNKALPAPIE KTISKAKGQP | |
| | REPRVYTLPP CRDELTKNQV SLTCLVKGFY | |
| | PSDIAVEWES NGQPENNYKT TPPVLVSDGS | |
| | FTLYSKLTVD KSRWQQGNVF SCSVMHEALH | |
| | NHYTQKSLSL SPG | |

Construct 19-1

| | | |
|---|---|---|
| RVESKYGPP | (SEQ ID NO: 69) | IgG4 (IL-12 p40) |
| CPPCPAPEFL | IWELKKDVYV VELDWYPDAP GEMVVLTCDT | Heterodimerization |
| GG (SEQ ID | PEEDGITWTL DQSSEVLGSG KTLTIRVKEF | mutations: |
| NO: 2) | GDAGQYTCHK GGEVLSHSLL LLHKKEDGIW | K370E, R409W |
| | STDILKDQKE PKNKTFLRCE AKNYSGRFTC | p40 substitutions: |
| | WWLTTISTDL TFSVKSSRGS SDPQGVTCGA | C177S, Y292C |
| | ATLSAERVRG DNKEYEYSVE CQEDSASPAA | (native disulfide bond |
| | EESLPIEVMV DAVHKLKYEN YTSSFFIRDI | between subunits is |
| | IKPDPPKNLQ LKPLKNSRQV EVSWEYPDTW | deleted) |
| | STPHSYFSLT FCVQVQGKSK REKKDRVFTD | Substitution for |
| | KTSATVICRK NASISVRAQD RCYSSSWSEW | preventing Fab-Arm |
| | ASVPCS RVES KYGPPCPPCP APEFLGGPSV | exchange and |
| | FLFPPKPKDT LMISRTPEVT CVVVDVSQED | improving |
| | PEVQFNWYVD GVEVHNAKTK PREEQFNSTY | thermostability: S228P |
| | RVVSVLTVLH QDWLNGKEYK CKVSNKGLPS | |
| | SIEKTISKAK GQPREPQVCT LPPSQEEMTK | |
| | NQVSLTCLVE GFYPSDIAVE WESNGQPENN | |
| | YKTTPPVLDS DGSFFLYSWL TVDKSRWQEG | |
| | NVFSCSVMHE ALHNHYTQKS LSLSLG | |
| GGGGSGGG | (SEQ ID NO: 70) | IgG4 (IL-12 p35) |
| GSGGGGSRV | RNLPVATPDP GMFPCLHHSQ NLLRAVSNML | Heterodimerization |
| ESKYGPPCPP | QKARQTLEFY PCTSEEIDHV DITKDKTSTV | mutations: |
| CPAPEFLGG | EACLPLELTK NESSLNSRET SFITNGSCLA | E357N/D399V/F405T |
| (SEQ ID | SRKTSFMMAL CLSSIYEDLK MYQVEFKTMN | p35 substitutions: C74S |
| NO: 3) | AKLLMDPKRQ IFLDQNMLAV IDELMQALNF | V185C |
| | NSETVPQKSS LEEPDFYKTK IKLCILLHAF | Substitution for |
| | RIRACTIDRV MSYLNASGGG GSGGGGSGGG | preventing Fab-Arm |
| | GSRVESKYGPPCPPCPAPEFLGGPSVFLFP | exchange and |
| | PKPKDTLMIS RTPEVTCVVV DVSQEDPEVQ | improving |
| | FNWYVDGVEV HNAKTKPREE QFNSTYRVVS | thermostability: S228P |
| | VLTVLHQDWL NGKEYKCKVS NKGLPSSIEK | |
| | TISKAKGQPR EPQVYTLPPCQENMTKNQVS | |
| | LTCLVKGFYP SDIAVEWESN GQPENNYKTT | |
| | PPVLVSDGSF TLYSRLTVDK SRWQEGNVFS | |
| | CSVMHEALHN HYTQKSLSLS LG | |

Construct 19-2

| | | |
|---|---|---|
| RVESKYGPP | (SEQ ID NO: 71) | IgG4 (IL-12 p40) |
| CPPCPAPEFL | IWELKKDVYV VELDWYPDAP GEMVVLTCDT | Heterodimerization |
| GG (SEQ ID | PEEDGITWTL DQSSEVLGSG KTLTIRVKEF | mutations: |
| NO: 2) | GDAGQYTCHK GGEVLSHSLL LLHKKEDGIW | K360E/R409W |
| | STDILKDQKE PKNKTFLRCE AKNYSGRFTC | p40 substitutions: |
| | WWLTTISTDL TFSVKSSRGS SDPQGVTCGA | C177S, Y292C |
| | ATLSAERVRG DNKEYEYSVE CQEDSASPAA | (native disulfide bond |
| | EESLPIEVMV DAVHKLKYEN YTSSFFIRDI | between subunits is |
| | IKPDPPKNLQ LKPLKNSRQV EVSWEYPDTW | deleted) |
| | STPHSYFSLT FCVQVQGKSK REKKDRVFTD | Substitution for |
| | KTSATVICRK NASISVRAQD RCYSSSWSEW | preventing Fab-Arm |
| | ASVPCS RVES KYGPPCPPCP APEFLGGPSV | exchange and |
| | FLFPPKPKDT LMISRTPEVT CVVVDVSQED | improving |
| | PEVQFNWYVD GVEVHNAKTK PREEQFNSTY | thermostability: S228P |
| | RVVSVLTVLH QDWLNGKEYK CKVSNKGLPS | |
| | SIEKTISKAK GQPREPQVCT LPPSQEEMTE | |
| | NQVSLTCLVK GFYPSDIAVE WESNGQPENN | |
| | YKTTPPVLDS DGSFFLYSWL TVDKSRWQEG | |
| | NVFSCSVMHE ALHNHYTQKS LSLSLG | |
| GGGGSGGG | (SEQ ID NO: 72) | IgG4 (IL-12 p35) |
| GSGGGGSRV | RNLPVATPDP GMFPCLHHSQ NLLRAVSNML | Heterodimerization |
| ESKYGPPCPP | QKARQTLEFY PCTSEEIDHV DITKDKTSTV | mutations: |
| CPAPEFLGG | EACLPLELTK NESSLNSRET SFITNGSCLA | Q347R/D399V/F405T |
| (SEQ ID | SRKTSFMMAL CLSSIYEDLK MYQVEFKTMN | p35 substitutions: C74S |
| NO: 3) | AKLLMDPKRQ IFLDQNMLAV IDELMQALNF | V185 |
| | NSETVPQKSS LEEPDFYKTK IKLCILLHAF | Substitution for |
| | RIRACTIDRV MSYLNASGGG GSGGGGSGGG | preventing Fab-Arm |
| | GSRVESKYGP PCPPCPAPEF LGGPSVFLFP | exchange and |
| | PKPKDTLMIS RTPEVTCVVV DVSQEDPEVQ | improving |
| | FNWYVDGVEV HNAKTKPREE QFNSTYRVVS | thermostability: S228P |
| | VLTVLHQDWL NGKEYKCKVS NKGLPSSIEK | |
| | TISKAKGQPR EPRVYTLPPC QEEMTKNQVS | |
| | LTCLVKGFYP SDIAVEWESN GQPENNYKTT | |
| | PPVLVSDGSF TLYSRLTVDK SRWQEGNVFS | |
| | CSVMHEALHN HYTQKSLSLS LG | |

Construct 19-3

| | | |
|---|---|---|
| RVESKYGPP | (SEQ ID NO: 73) | IgG4 (IL-12 p40) |
| CPPCPAPEFE | IWELKKDVYV VELDWYPDAP GEMVVLTCDT | Heterodimerization |
| GG (SEQ ID | PEEDGITWTL DQSSEVLGSG KTLTIRVKEF | mutations: |
| NO: 4) | GDAGQYTCHK GGEVLSHSLL LLHKKEDGIW | K360E/R409W |
| | STDILKDQKE PKNKTFLRCE AKNYSGRFTC | p40 substitutions: |
| | WWLTTISTDL TFSVKSSRGS SDPQGVTCGA | C177S, Y292C |
| | ATLSAERVRG DNKEYEYSVE CQEDSASPAA | (native disulfide bond |
| | EESLPIEVMV DAVHKLKYEN YTSSFFIRDI | between subunits is |
| | IKPDPPKNLQ LKPLKNSRQV EVSWEYPDTW | deleted) |
| | STPHSYFSLT FCVQVQGKSK REKKDRVFTD | Substitution for |
| | KTSATVICRK NASISVRAQD RCYSSSWSEW | preventing Fab-Arm |
| | ASVPCS RVES KYGPPCPPCP APEFEGGPSV | exchange and |
| | FLFPPKPKDT LMISRTPEVT CVVVDVSQED | improving |
| | PEVQFNWYVD GVEVHNAKTK PREEQFNSTY | thermostability: S228P |
| | RVVSVLTVLH QDWLNGKEYK CKVSNKGLPS | Substitutions for |
| | SIEKTISKAK GQPREPQVCT LPPSQEEMTE | reducing FcγR binding: |
| | NQVSLTCLVK GFYPSDIAVE WESNGQPENN | S228P and L235E |
| | YKTTPPVLDS DGSFFLYSWL TVDKSRWQEG | |
| | NVFSCSVMHE ALHNHYTQKS LSLSLG | |
| GGGGSGGG | (SEQ ID NO: 74) | IgG4 (IL-12 p35) |
| GSGGGGSRV | RNLPVATPDP GMFPCLHHSQ NLLRAVSNML | Heterodimerization |
| ESKYGPPCPP | QKARQTLEFY PCTSEEIDHV DITKDKTSTV | mutations: |
| CPAPEFEGG | EACLPLELTK NESSLNSRET SFITNGSCLA | Q347R/D399V/F405T |
| (SEQ ID | SRKTSFMMAL CLSSIYEDLK MYQVEFKTMN | p35 substitutions: C74S |
| NO: 5) | AKLLMDPKRQ IFLDQNMLAV IDELMQALNF | V185C |
| | NSETVPQKSS LEEPDFYKTK IKLCILLHAF | Substitution for |
| | RIRACTIDRV MSYLNASGGG GSGGGGSGGG | preventing Fab-Arm |
| | GSRVESKYGP PCPPCPAPEF EGGPSVFLFP | exchange and |
| | PKPKDTLMIS RTPEVTCVVV DVSQEDPEVQ | improving |
| | FNWYVDGVEV HNAKTKPREE QFNSTYRVVS | thermostability: S228P |
| | VLTVLHQDWL NGKEYKCKVS NKGLPSSIEK | Substitutions for |
| | TISKAKGQPR EPRVYTLPPC QEEMTKNQVS | reducing FcγR binding: |
| | LTCLVKGFYP SDIAVEWESN GQPENNYKTT | |
| | PPVLVSDGSF TLYSRLTVDK SRWQEGNVFS | |
| | CSVMHEALHN HYTQKSLSLS LG | S228P and L235E |

Construct 19-4

| | | |
|---|---|---|
| RVESKYGPP | (SEQ ID NO: 75) | IgG4 (IL-12 p40) |
| CPPCPAPEFE | IWELKKDVYV VELDWYPDAP GEMVVLTCDT | Heterodimerization |
| GG (SEQ ID | PEEDGITWTL DQSSEVLGSG KTLTIRVKEF | mutations: |
| NO: 4) | GDAGQYTCHK GGEVLSHSLL LLHKKEDGIW | K360E/R409W |
| | STDILKDQKE PKNKTFLRCE AKNYSGRFTC | p40 substitutions: |
| | WWLTTISTDL TFSVKSSRGS SDPQGVTCGA | C177S, Y292C |
| | ATLSAERVRG DNKEYEYSVE CQEDSASPAA | (native disulfide bond |
| | EESLPIEVMV DAVHKLKYEN YTSSFFIRDI | between subunits is |
| | IKPDPPKNLQ LKPLKNSRQV EVSWEYPDTW | deleted) |
| | STPHSYFSLT FCVQVQGKSK REKKDRVFTD | Substitution for |
| | KTSATVICRK NASISVRAQD RCYSSSWSEW | preventing Fab-Arm |
| | ASVPCSRVES KYGPPCPPCP APEFEGGPSV | exchange and |
| | FLFPPKPKDT LMISRTPEVT CVVVDVSQED | improving |
| | PEVQFNWYVD GVEVHNAKTK PREEQFNSTY | thermostability: S228P |
| | RVVSVLTVLH QDWLNGKEYK CKVSNKGLAS | Substitutions for |
| | SIEKTISKAK GQPREPQVCT LPPSQEEMTE | reducing FcγR binding: |
| | NQVSLTCLVK GFYPSDIAVE WESNGQPENN | S228P, L235E, P329A |
| | YKTTPPVLDS DGSFFLYSWL TVDKSRWQEG | |
| | NVFSCSVMHE ALHNHYTQKS LSLSLG | |
| GGGGGSGGG | (SEQ ID NO: 76) | IgG4 (IL-12 p35) |
| GSGGGGSRV | RNLPVATPDP GMFPCLHHSQ NLLRAVSNML | Heterodimerization |
| ESKYGPPCPP | QKARQTLEFY PCTSEEIDHV DITKDKTSTV | mutations: |
| CPAPEFEGG | EACLPLELTK NESSLNSRET SFITNGSCLA | Q347R/D399V/F405T |
| (SEQ ID | SRKTSFMMAL CLSSIYEDLK MYQVEFKTMN | p35 substitutions: C74S |
| NO: 5) | AKLLMDPKRQ IFLDQNMLAV IDELMQALNF | V185C |
| | NSETVPQKSS LEEPDFYKTK IKLCILLHAF | Substitution for |
| | RIRACTIDRV MSYLNASGGG GSGGGGSGGG | preventing Fab-Arm |
| | GSRVESKYGP PCPPCPAPEF EGGPSVFLFP | exchange and |
| | PKPKDTLMIS RTPEVTCVVV DVSQEDPEVQ | improving |
| | FNWYVDGVEV HNAKTKPREE QFNSTYRVVS | thermostability: S228P |
| | VLTVLHQDWL NGKEYKCKVS NKGLASSIEK | Substitutions for |
| | TISKAKGQPR EPRVYTLPPC QEEMTKNQVS | reducing FcγR binding: |
| | LTCLVKGFYP SDIAVEWESN GQPENNYKTT | S228P, L235E, P329A |
| | PPVLVSDGSF TLYSRLTVDK SRWQEGNVFS | |
| | CSVMHEALHN HYTQKSLSLS LG | |

Construct 19-5

| | | |
|---|---|---|
| RVESKYGPP | (SEQ ID NO: 77) | IgG4 (IL-12 p40) |
| CPPCPAPEFE | IWELKKDVYV VELDWYPDAP GEMVVLTCDT | Heterodimerization |
| GG (SEQ ID | PEEDGITWTL DQSSEVLGSG KTLTIRVKEF | mutations: |
| NO: 4) | GDAGQYTCHK GGEVLSHSLL LLHKKEDGIW | K360E/R409W |
| | STDILKDQKE PKNKTFLRCE AKNYSGRFTC | p40 substitutions: |
| | WWLTTISTDL TFSVKSSRGS SDPQGVTCGA | C177S, Y292C |
| | ATLSAERVRG DNKEYEYSVE CQEDSASPAA | (native disulfide bond |
| | EESLPIEVMV DAVHKLKYEN YTSSFFIRDI | between subunits is |
| | IKPDPPKNLQ LKPLKNSRQV EVSWEYPDTW | deleted) |
| | STPHSYFSLT FCVQVQGKSK REKKDRVFTD | Substitution for |
| | KTSATVICRK NASISVRAQD RCYSSSWSEW | preventing Fab-Arm |
| | ASVPCSRVES KYGPPCPPCP APEFEGGPSV | exchange and |
| | FLFPPKPKDT LMISRTPEVT CVVVDVSQED | improving |
| | PEVQFNWYVD GVEVHNAKTK PREEQFNSTY | thermostability: S228P |
| | RVVSVLTVLH QDWLNGKEYK CKVSNKGLGS | Substitutions for |
| | SIEKTISKAK GQPREPQVCT LPPSQEEMTE | reducing FcγR binding: |
| | NQVSLTCLVK GFYPSDIAVE WESNGQPENN | S228P, L235E, P329G |
| | YKTTPPVLDS DGSFFLYSWL TVDKSRWQEG | |
| | NVFSCSVMHE ALHNHYTQKS LSLSLG | |
| GGGGGSGGG | (SEQ ID NO: 78) | IgG4 (IL-12 p35) |
| GSGGGGSRV | RNLPVATPDP GMFPCLHHSQ NLLRAVSNML | Heterodimerization |
| ESKYGPPCPP | QKARQTLEFY PCTSEEIDHV DITKDKTSTV | mutations: |
| CPAPEFEGG | EACLPLELTK NESSLNSRET SFITNGSCLA | Q347R/D399V/F405T |
| (SEQ ID | SRKTSFMMAL CLSSIYEDLK MYQVEFKTMN | p35 substitutions: C74S |
| NO: 5) | AKLLMDPKRQ IFLDQNMLAV IDELMQALNF | V185C |
| | NSETVPQKSS LEEPDFYKTK IKLCILLHAF | Substitution for |
| | RIRACTIDRV MSYLNASGGG GSGGGGSGGG | preventing Fab-Arm |
| | GSRVESKYGP PCPPCPAPEF EGGPSVFLFP | exchange and |
| | PKPKDTLMIS RTPEVTCVVV DVSQEDPEVQ | improving |
| | FNWYVDGVEV HNAKTKPREE QFNSTYRVVS | thermostability: S228P |
| | VLTVLHQDWL NGKEYKCKVS NKGLGSSIEK | Substitutions for |
| | TISKAKGQPR EPRVYTLPPC QEEMTKNQVS | reducing FcγR binding: |
| | LTCLVKGFYP SDIAVEWESN GQPENNYKTT | S228P, L235E, P329G |
| | PPVLVSDGSF TLYSRLTVDK SRWQEGNVFS | |
| | CSVMHEALHN HYTQKSLSLS LG | |

Construct 19-6

| | | |
|---|---|---|
| EPKSSDKTH | (SEQ ID NO: 79) | IgG1 (IL-12 p40) |
| TCPPCPAPEL | IWELKKDVYV VELDWYPDAP GEMVVLTCDT | Heterodimerization |
| LGG (SEQ ID | PEEDGITWTL DQSSEVLGSG KTLTIRVKEF | mutations: |
| NO: 7) | GDAGQYTCHK GGEVLSHSLL LLHKKEDGIW | K360EK409W |
| | STDILKDQKE PKNKTFLRCE AKNYSGRFTC | p40 substitutions: |
| | WWLTTISTDL TFSVKSSRGS SDPQGVTCGA | C177S, Y292C |
| | ATLSAERVRG DNKEYEYSVE CQEDSASPAA | (native disulfide bond |
| | EESLPIEVMV DAVHKLKYEN YTSSFFIRDI | between subunits is |
| | IKPDPPKNLQ LKPLKNSRQV EVSWEYPDTW | deleted) |
| | STPHSYFSLT FCVQVQGKSK REKKDRVFTD | C220 in the upper hinge |
| | KTSATVICRK NASISVRAQD RCYSSSWSEW | is mutated to S |
| | ASVPCSEPKS SDKTHTCPPC PAPELLGGPS | |
| | VFLFPPKPKD TLMISRTPEV TCVVVDVSHE | |
| | DPEVKFNWYV DGVEVHNAKT KPREEQYNST | |
| | YRVVSVLTVL HQDWLNGKEY KCKVSNKALP | |
| | APIEKTISKA KGQPREPQVC TLPPSRDELT | |
| | ENQVSLTCLV KGFYPSDIAV EWESNGQPEN | |
| | NYKTTPPVLD SDGSFFLYSWLTVDKSRWQQ | |
| | GNVFSCSVMH EALHNHYTQK SLSLSPG | |
| GGGGGSGGG | (SEQ ID NO: 80) | IgG1 (IL-12 p35) |
| GSGGGGSEP | RNLPVATPDP GMFPCLHHSQ NLLRAVSNML | Heterodimerization |
| KSSDKTHTC | QKARQTLEFY PCTSEEIDHV DITKDKTSTV | mutations: |
| PPCPAPELLG | EACLPLELTK NESSLNSRET SFITNGSCLA | Q347R/D399V/F405T |
| G (SEQ ID | SRKTSFMMAL CLSSIYEDLK MYQVEFKTMN | p35 substitutions: C74S |
| NO: 8) | AKLLMDPKRQ IFLDQNMLAV IDELMQALNF | V185C |
| | NSETVPQKSS LEEPDFYKTK IKLCILLHAF | C220 in the upper hinge |
| | RIRACTIDRV MSYLNASGGG GSGGGGSGGG | is mutated to S |
| | GSEPKSSDKT HTCPPCPAPE LLGGPSVFLF | |
| | PPKPKDTLMI SRTPEVTCVV VDVSHEDPEV | |
| | KFNWYVDGVE VHNAKTKPRE EQYNSTYRVV | |
| | SVLTVLHQDW LNGKEYKCKV SNKALPAPIE | |
| | KTISKAKGQP REPRVYTLPPCRDELTKNQV | |
| | SLTCLVKGFY PSDIAVEWES NGQPENNYKT | |
| | TPPVLVSDGSFTLYSKLTVD KSRWQQGNVF | |
| | SCSVMHEALH NHYTQKSLSL SPG | |

Construct 19-7

| | | |
|---|---|---|
| EPKSSDKTH | (SEQ ID NO: 81) | IgG1 (IL-12 p40) |
| TCPPCPAPEA | IWELKKDVYV VELDWYPDAP GEMVVLTCDT | Heterodimerization |
| AGG (SEQ ID | PEEDGITWTL DQSSEVLGSG KTLTIRVKEF | mutations: |
| NO: 9) | GDAGQYTCHK GGEVLSHSLL LLHKKEDGIW | K360EK409W |
| | STDILKDQKE PKNKTFLRCE AKNYSGRFTC | p40 substitutions: |
| | WWLTTISTDL TFSVKSSRGS SDPQGVTCGA | C177S, Y292C |
| | ATLSAERVRG DNKEYEYSVE CQEDSASPAA | (native disulfide bond |
| | EESLPIEVMV DAVHKLKYEN YTSSFFIRDI | between subunits is |
| | IKPDPPKNLQ LKPLKNSRQV EVSWEYPDTW | deleted) |
| | STPHSYFSLT FCVQVQGKSK REKKDRVFTD | Substitutions for |
| | KTSATVICRK NASISVRAQD RCYSSSWSEW | reducing FcγR binding: |
| | ASVPCSEPKS SDKTHTCPPC PAPEAAGGPS | L234A, L235A |
| | VFLFPPKPKD TLMISRTPEV TCVVVDVSHE | C220 in the upper hinge |
| | DPEVKFNWYV DGVEVHNAKT KPREEQYNST | is mutated to S |
| | YRVVSVLTVLHQDWLNGKEY KCKVSNKALP | |
| | APIEKTISKAKGQPREPQVCTLPPSRDELTENQ | |
| | VSLTCLV KGFYPSDIAV EWESNGQPEN | |
| | NYKTTPPVLD SDGSFFLYSWLTVDKSRWQQ | |
| | GNVFSCSVMH EALHNHYTQK SLSLSPG | |
| GGGGGSGGG | (SEQ ID NO: 82) | IgG1 (IL-12 p35) |
| GSGGGGSEP | RNLPVATPDP GMFPCLHHSQ NLLRAVSNML | Heterodimerization |
| KSSDKTHTC | QKARQTLEFY PCTSEEIDHV DITKDKTSTV | mutations: |
| PPCPAPEAA | EACLPLELTK NESSLNSRET SFITNGSCLA | Q347R/D399V/F405T |
| GG (SEQ ID | SRKTSFMMAL CLSSIYEDLK MYQVEFKTMN | p35 substitutions: C74S |
| NO: 10) | AKLLMDPKRQ IFLDQNMLAV IDELMQALNF | V185C |
| | NSETVPQKSS LEEPDFYKTK IKLCILLHAF | Substitutions for |
| | RIRACTIDRV MSYLNASGGG GSGGGGSGGG | reducing FcγR binding: |
| | GSEPKSSDKT HTCPPCPAPE AAGGPSVFLF | L234A, L235A |
| | PPKPKDTLMI SRTPEVTCVV VDVSHEDPEV | C220 in the upper hinge |
| | KFNWYVDGVE VHNAKTKPRE EQYNSTYRVV | is mutated to S |
| | SVLTVLHQDW LNGKEYKCKV SNKALPAPIE | |
| | KTISKAKGQP REPRVYTLPPCRDELTKNQV | |
| | SLTCLVKGFY PSDIAVEWES NGQPENNYKT | |
| | TPPVLVSDGS FTLYSKLTVD KSRWQQGNVF | |
| | SCSVMHEALH NHYTQKSLSL SPG | |

Construct 19-8

| | | |
|---|---|---|
| EPKSSDKTH | (SEQ ID NO: 83) | IgG1 (IL-12 p40) |
| TCPPCPAPEA | IWELKKDVYV VELDWYPDAP GEMVVLTCDT | Heterodimerization |
| AGG (SEQ ID | PEEDGITWTL DQSSEVLGSG KTLTIRVKEF | mutations: |
| NO: 9) | GDAGQYTCHK GGEVLSHSLL LLHKKEDGIW | K360E/K409W |
| | STDILKDQKE PKNKTFLRCE AKNYSGRFTC | p40 substitutions: |
| | WWLTTISTDL TFSVKSSRGS SDPQGVTCGA | C177S, Y292C |
| | ATLSAERVRG DNKEYEYSVE CQEDSASPAA | (native disulfide bond |
| | EESLPIEVMV DAVHKLKYEN YTSSFFIRDI | between subunits is |
| | IKPDPPKNLQ LKPLKNSRQV EVSWEYPDTW | deleted) |
| | STPHSYFSLT FCVQVQGKSK REKKDRVFTD | Substitutions for |
| | KTSATVICRK NASISVRAQD RCYSSSWSEW | reducing FcγR binding: |
| | ASVPCSEPKS SDKTHTCPPC PAPEAAGGPS | L234A, L235A, P329A |
| | VFLFPPKPKD TLMISRTPEVTCVVVDVSHE | C220 in the upper hinge |
| | DPEVKFNWYV DGVEVHNAKT KPREEQYNST | is mutated to S |
| | YRVVSVLTVL HQDWLNGKEYKCKVSNKALA | |
| | APIEKTISKAKGQPREPQVCTLPPSRDELTENQ | |
| | VSLTCLV KGFYPSDIAV EWESNGQPEN | |
| | NYKTTPPVLD SDGSFFLYSWLTVDKSRWQQ | |
| | GNVFSCSVMH EALHNHYTQK SLSLSPG | |
| GGGGGSGGG | (SEQ ID NO: 84) | IgG1 (IL-12 p35) |
| GSGGGGSEP | RNLPVATPDP GMFPCLHHSQ NLLRAVSNML | Heterodimerization |
| KSSDKTHTC | QKARQTLEFY PCTSEEIDHV DITKDKTSTV | mutations: |
| PPCPAPEAA | EACLPLELTK NESSLNSRET SFITNGSCLA | Q347R/D399V/F405T |
| GG (SEQ ID | SRKTSFMMAL CLSSIYEDLK MYQVEFKTMN | p35 substitutions: |
| NO: 10) | AKLLMDPKRQ IFLDQNMLAV IDELMQALNF | C74S, V185C |
| | NSETVPQKSS LEEPDFYKTK IKLCILLHAF | Substitutions for |
| | RIRACTIDRV MSYLNASGGG GSGGGGSGGG | reducins; FcγR binding: |
| | GSEPKSSDKT HTCPPCPAPE AAGGPSVFLF | L234A, L235A, P329A |
| | PPKPKDTLMISRTPEVTCVV VDVSHEDPEV | C220 in the upper hinge |
| | KFNWYVDGVE VHNAKTKPRE EQYNSTYRVV | is mutated to S |
| | SVLTVLHQDW LNGKEYKCKV SNKALAAPIE | |
| | KTISKAKGQP REPRVYTLPP CRDELTKNQV | |
| | SLTCLVKGFY PSDIAVEWES NGQPENNYKT | |
| | TPPVLVSDGS FTLYSKLTVD KSRWQQGNVF | |
| | SCSVMHEALH NHYTQKSLSL SPG | |

Construct 19-9

| | | |
|---|---|---|
| EPKSSDKTH | (SEQ ID NO: 85) | IgG1 (IL-12 p40) |
| TCPPCPAPEA | IWELKKDVYV VELDWYPDAP GEMVVLTCDT | Heterodimerization |
| AGG (SEQ ID | PEEDGITWTL DQSSEVLGSG KTLTIRVKEF | mutations: |
| NO: 9) | GDAGQYTCHK GGEVLSHSLL LLHKKEDGIW | K360E/K409W |
| | STDILKDQKE PKNKTFLRCE AKNYSGRFTC | p40 substitutions: |
| | WWLTTISTDL TFSVKSSRGS SDPQGVTCGA | C177S, Y292C |
| | ATLSAERVRG DNKEYEYSVE CQEDSASPAA | (native disulfide bond |
| | EESLPIEVMV DAVHKLKYEN YTSSFFIRDI | between subunits is |
| | IKPDPPKNLQ LKPLKNSRQV EVSWEYPDTW | deleted) |
| | STPHSYFSLT FCVQVQGKSK REKKDRVFTD | Substitutions for |
| | KTSATVICRK NASISVRAQD RCYSSSWSEW | reducing FcγR binding: |
| | ASVPCSEPKS SDKTHTCPPC PAPEAAGGPS | L234A/L235A/P329G |
| | VFLFPPKPKD TLMISRTPEVTCVVVDVSHE | C220 in the upper hinge |
| | DPEVKFNWYV DGVEVHNAKT KPREEQYNST | is mutated to S |
| | YRVVSVLTVLHQDWLNGKEY KCKVSNKALG | |
| | APIEKTISKAKGQPREPQVCTLPPSRDELTENQ | |
| | VSLTCLV KGFYPSDIAV EWESNGQPEN | |
| | NYKTTPPVLD SDGSFFLYSWLTVDKSRWQQ | |
| | GNVFSCSVMH EALHNHYTQK SLSLSPG | |
| GGGGGSGGG | (SEQ ID NO: 86) | IgG1 (IL-12 p35) |
| GSGGGGSEP | RNLPVATPDP GMFPCLHHSQ NLLRAVSNML | Heterodimerization |
| KSSDKTHTC | QKARQTLEFY PCTSEEIDHV DITKDKTSTV | mutations: |
| PPCPAPEAA | EACLPLELTK NESSLNSRET SFITNGSCLA | Q347R/D399V/F405T |
| GG (SEQ ID | SRKTSFMMAL CLSSIYEDLK MYQVEFKTMN | p35 substitutions: C74S |
| NO: 10) | AKLLMDPKRQ IFLDQNMLAV IDELMQALNF | V185C |
| | NSETVPQKSS LEEPDFYKTK IKLCILLHAF | Substitutions for |
| | RIRACTIDRV MSYLNASGGG GSGGGGSGGG | reducing FcγR binding: |
| | GSEPKSSDKT HTCPPCPAPE AAGGPSVFLF | L234A, L235A, P329G |
| | PPKPKDTLMI SRTPEVTCVV VDVSHEDPEV | C220 in the upper hinge |
| | KFNWYVDGVE VHNAKTKPRE EQYNSTYRVV | is mutated to S |
| | SVLTVLHQDW LNGKEYKCKV SNKALGAPIE | |
| | KTISKAKGQP REPRVYTLPPCRDELTKNQV | |
| | SLTCLVKGFY PSDIAVEWES NGQPENNYKT | |
| | TPPVLVSDGS FTLYSKLTVD KSRWQQGNVF | |
| | SCSVMHEALH NHYTQKSLSL SPG | |

Construct 19-10

| | | |
|---|---|---|
| EPKSSDKTH | (SEQ ID NO: 87) | IgG1 (IL-12 p40) |
| TCPPCPAPEA | IWELKKDVYV VELDWYPDAP GEMVVLTCDT | Heterodimerization |
| EGA (SEQ ID | PEEDGITWTL DQSSEVLGSG KTLTIRVKEF | mutations: |
| NO: 11) | GDAGQYTCHK GGEVLSHSLL LLHKKEDGIW | K360EK409W |
| | STDILKDQKE PKNKTFLRCE AKNYSGRFTC | p40 substitutions: |
| | WWLTTISTDL TFSVKSSRGS SDPQGVTCGA | C177S, Y292C |
| | ATLSAERVRG DNKEYEYSVE CQEDSASPAA | (native disulfide bond |
| | EESLPIEVMV DAVHKLKYEN YTSSFFIRDI | between subunits is |
| | IKPDPPKNLQ LKPLKNSRQV EVSWEYPDTW | deleted) |
| | STPHSYFSLT FCVQVQGKSK REKKDRVFTD | Substitutions for |
| | KTSATVICRK NASISVRAQD RCYSSSWSEW | reducing FcγR and C1q |
| | ASVPCSEPKS SDKTHTCPPC PAPEAEGAPS | binding: L234A, |
| | VFLFPPKPKD TLMISRTPEV TCVVVDVSHE | L235E, G237A, |
| | DPEVKFNWYV DGVEVHNAKT KPREEQYNST | A330S, P331S |
| | YRVVSVLTVL HQDWLNGKEY KCKVSNKALP | C220 in the upper hinge |
| | SSIEKTISKAKGQPREPQVCTLPPSRDELTENQ | is mutated to S |
| | VSLTCLV KGFYPSDIAV EWESNGQPEN | |
| | NYKTTPPVLD SDGSFFLYSWLTVDKSRWQQ | |
| | GNVFSCSVMH EALHNHYTQK SLSLSPG | |
| GGGGGSGGG | (SEQ ID NO: 88) | IgG1 (IL-12 p35) |
| GSGGGGSEP | RNLPVATPDP GMFPCLHHSQ NLLRAVSNML | Heterodimerization |
| KSSDKTHTC | QKARQTLEFY PCTSEEIDHV DITKDKTSTV | mutations: |
| PPCPAPEAEG | EACLPLELTK NESSLNSRET SFITNGSCLA | Q347R/D399V/F405T |
| A (SEQ ID | SRKTSFMMAL CLSSIYEDLK MYQVEFKTMN | p35 substitutions: |
| NO: 12) | AKLLMDPKRQ IFLDQNMLAV IDELMQALNF | C74S, V185 |
| | NSETVPQKSS LEEPDFYKTK IKLCILLHAF | Substitutions for |
| | RIRACTIDRV MSYLNASGGG GSGGGGSGGG | reducing FcγR and C1q |
| | GSEPKSSDKT HTCPPCPAPE AEGAPSVFLF | binding: L234A, |
| | PPKPKDTLMISRTPEVTCVV VDVSHEDPEV | L235E, G237A, |
| | KFNWYVDGVE VHNAKTKPRE EQYNSTYRVV | A330S, P331S |
| | SVLTVLHQDW LNGKEYKCKV SNKALPSSIE | C220 in the upper hinge |
| | KTISKAKGQP REPRVYTLPP CRDELTKNQV | is mutated to S |
| | SLTCLVKGFY PSDIAVEWES NGQPENNYKT | |
| | TPPVLVSDGS FTLYSKLTVD KSRWQQGNVF | |
| | SCSVMHEALH NHYTQKSLSL SPG | |

Construct 20

| | | |
|---|---|---|
| RVESKYGPP | (SEQ ID NO: 55) | IgG4 (IL-12 p40) |
| CPPCPAPEFL | IWELKKDVYV VELDWYPDAP GEMVVLTCDT | Heterodimerization |
| GG (SEQ ID | PEEDGITWTL DQSSEVLGSG KTLTIRVKEF | mutations: |
| NO: 2) | GDAGQYTCHK GGEVLSHSLL LLHKKEDGIW | K370E/R409W |
| | STDILKDQKE PKNKTFLRCE AKNYSGRFTC | p40 substitution: |
| | WWLTTISTDL TFSVKSSRGS SDPQGVTCGA | Y292C (native disulfide |
| | ATLSAERVRG DNKEYEYSVE CQEDSACPAA | bond between subunits |
| | EESLPIEVMV DAVHKLKYEN YTSSFFIRDI | is preserved) |
| | IKPDPPKNLQ LKPLKNSRQV EVSWEYPDTW | Substitution for |
| | STPHSYFSLT FCVQVQGKSK REKKDRVFTD | preventing Fab-Arm |
| | KTSATVICRK NASISVRAQD RCYSSSWSEW | exchange and |
| | ASVPCSRVES KYGPPCPPCP APEFLGGPSV | improving |
| | FLFPPKPKDT LMISRTPEVT CVVVDVSQED | thermostability: S228P |
| | PEVQFNWYVD GVEVHNAKTK PREEQFNSTY | |
| | RVVSVLTVLH QDWLNGKEYK CKVSNKGLPS | |
| | SIEKTISKAK GQPREPQVCT LPPSQEEMTK | |
| | NQVSLTCLVE GFYPSDIAVE WESNGQPENN | |
| | YKTTPPVLDS DGSFFLYSWL TVDKSRWQEG | |
| | NVFSCSVMHE ALHNHYTQKS LSLSLG | |
| GGGGGSGGG | (SEQ ID NO: 56) | IgG4 (IL-12 p35) |
| GSGGGGSRV | RNLPVATPDP GMFPCLHHSQ NLLRAVSNML | Heterodimerization |
| ESKYGPPCPP | QKARQTLEFY PCTSEEIDHV DITKDKTSTV | mutations: |
| CPAPEFLGG | EACLPLELTK NESCLNSRET SFITNGSCLA | E357N/D399V/F405T |
| (SEQ ID | SRKTSFMMAL CLSSIYEDLK MYQVEFKTMN | p35 substitution: |
| NO: 3) | AKLLMDPKRQ IFLDQNMLAV IDELMQALNF | V185C (native disulfide |
| | NSETVPQKSS LEEPDFYKTK IKLCILLHAF | bond between subunits |
| | RIRACTIDRV MSYLNASGGG GSGGGGSGGG | is preserved) |
| | GSRVESKYGP PCPPCPAPEF LGGPSVFLFP | Substitution for |
| | PKPKDTLMIS RTPEVTCVVV DVSQEDPEVQ | preventing Fab-Arm |
| | FNWYVDGVEV HNAKTKPREE QFNSTYRVVS | exchange and |
| | VLTVLHQDWL NGKEYKCKVS NKGLPSSIEK | improving |
| | TISKAKGQPR EPQVYTLPPCQENMTKNQVS | thermostability: S228P |
| | LTCLVKGFYP SDIAVEWESN GQPENNYKTT | |
| | PPVLVSDGSF TLYSRLTVDK SRWQEGNVFS | |
| | CSVMHEALHN HYTQKSLSLS LG | |

Construct 20-1

| | | |
|---|---|---|
| RVESKYGPP | (SEQ ID NO: 89) | IgG4 (IL-12 p40) |
| CPPCPAPEFL | IWELKKDVYV VELDWYPDAP GEMVVLTCDT | Heterodimerization |
| GG (SEQ ID | PEEDGITWTL DQSSEVLGSG KTLTIRVKEF | mutations: |
| NO: 2) | GDAGQYTCHK GGEVLSHSLL LLHKKEDGIW | K360E/R409W |
| | STDILKDQKE PKNKTFLRCE AKNYSGRFTC | p40 substitution: |
| | WWLTTISTDL TFSVKSSRGS SDPQGVTCGA | Y292C (native disulfide |
| | ATLSAERVRG DNKEYEYSVE CQEDSACPAA | bond between subunits |
| | EESLPIEVMV DAVHKLKYEN YTSSFFIRDI | is preserved) |
| | IKPDPPKNLQ LKPLKNSRQV EVSWEYPDTW | Substitution for |
| | STPHSYFSLT FCVQVQGKSK REKKDRVFTD | preventing Fab-Arm |
| | KTSATVICRK NASISVRAQD RCYSSSWSEW | exchange and |
| | ASVPCSRVES KYGPPCPPCP APEFLGGPSV | improving |
| | FLFPPKPKDT LMISRTPEVT CVVVDVSQED | thermostability: S228P |
| | PEVQFNWYVD GVEVHNAKTK PREEQFNSTY | |
| | RVVSVLTVLH QDWLNGKEYK CKVSNKGLPS | |
| | SIEKTISKAK GQPREPQVCT LPPSQEEMTE | |
| | NQVSLTCLVK GFYPSDIAVE WESNGQPENN | |
| | YKTTPPVLDS DGSFFLYSWL TVDKSRWQEG | |
| | NVFSCSVMHE ALHNHYTQKS LSLSLG | |
| GGGGGSGGG | (SEQ ID NO: 90) | IgG4 (IL-12 p35) |
| GSGGGGSRV | RNLPVATPDP GMFPCLHHSQ NLLRAVSNML | Heterodimerization |
| ESKYGPPCPP | QKARQTLEFY PCTSEEIDHV DITKDKTSTV | mutations: |
| CPAPEFLGG | EACLPLELTK NESCLNSRET SFITNGSCLA | Q347R/D399V/F405T |
| (SEQ ID | SRKTSFMMAL CLSSIYEDLK MYQVEFKTMN | p35 substitution: |
| NO: 3) | AKLLMDPKRQ IFLDQNMLAV IDELMQALNF | V185C (native disulfide |
| | NSETVPQKSS LEEPDFYKTK IKLCILLHAF | bond between subunits |
| | RIRACTIDRV MSYLNASGGG GSGGGGSGGG | is preserved) |
| | GSRVESKYGP PCPPCPAPEF LGGPSVFLFP | Substitution for |
| | PKPKDTLMIS RTPEVTCVVV DVSQEDPEVQ | preventing Fab-Arm |
| | FNWYVDGVEV HNAKTKPREE QFNSTYRVVS | exchange and |
| | VLTVLHQDWL NGKEYKCKVS NKGLPSSIEK | improving |
| | TISKAKGQPR EPRVYTLPPCQEEMTKNQVS | thermostability: S228P |
| | LTCLVKGFYP SDIAVEWESN GQPENNYKTT | |
| | PPVLVSDGSF TLYSRLTVDK SRWQEGNVFS | |
| | CSVMHEALHN HYTQKSLSLS LG | |

Construct 20-2

| | | |
|---|---|---|
| RVESKYGPP | (SEQ ID NO: 91) | IgG4 (IL-12 p40) |
| CPPCPAPEFE | IWELKKDVYV VELDWYPDAP GEMVVLTCDT | Heterodimerization |
| GG (SEQ ID | PEEDGITWTL DQSSEVLGSG KTLTIRVKEF | mutations: |
| NO: 4) | GDAGQYTCHK GGEVLSHSLL LLHKKEDGIW | K360E/R409W |
| | STDILKDQKE PKNKTFLRCE AKNYSGRFTC | p40 substitution: |
| | WWLTTISTDL TFSVKSSRGS SDPQGVTCGA | Y292C (native disulfide |
| | ATLSAERVRG DNKEYEYSVE CQEDSACPAA | bond between subunits |
| | EESLPIEVMV DAVHKLKYEN YTSSFFIRDI | is preserved) |
| | IKPDPPKNLQ LKPLKNSRQV EVSWEYPDTW | Substitution for |
| | STPHSYFSLT FCVQVQGKSK REKKDRVFTD | preventing Fab-Arm |
| | KTSATVICRK NASISVRAQD RCYSSSWSEW | exchange and |
| | ASVPCSRVES KYGPPCPPCP APEFEGGPSV | improving |
| | FLFPPKPKDT LMISRTPEVT CVVVDVSQED | thermostability: S228P |
| | PEVQFNWYVD GVEVHNAKTK PREEQFNSTY | Substitutions for |
| | RVVSVLTVLH QDWLNGKEYK CKVSNKGLPS | reducing FcγR binding: |
| | SIEKTISKAK GQPREPQVCT LPPSQEEMTE | S228P and L235E |
| | NQVSLTCLVK GFYPSDIAVE WESNGQPENN | |
| | YKTTPPVLDS DGSFFLYSWL TVDKSRWQEG | |
| | NVFSCSVMHE ALHNHYTQKS LSLSLG | |
| GGGGSGGG | (SEQ ID NO: 92) | IgG4 (IL-12 p35) |
| GSGGGGSRV | RNLPVATPDP GMFPCLHHSQ NLLRAVSNML | Heterodimerization |
| ESKYGPPCPP | QKARQTLEFY PCTSEEIDHV DITKDKTSTV | mutations: |
| CPAPEFEGG | EACLPLELTK NESCLNSRET SFITNGSCLA | Q347R/D399V/F405T |
| (SEQ ID | SRKTSFMMAL CLSSIYEDLK MYQVEFKTMN | p35 substitution: |
| NO:5 ) | AKLLMDPKRQ IFLDQNMLAV IDELMQALNF | V185C (native disulfide |
| | NSETVPQKSS LEEPDFYKTK IKLCILLHAF | bond between subunits |
| | RIRACTIDRV MSYLNASGGG GSGGGGSGGG | is preserved) |
| | GSRVESKYGP PCPPCPAPEF EGGPSVFLFP | Substitution for |
| | PKPKDTLMIS RTPEVTCVVV DVSQEDPEVQ | preventing Fab-Arm |
| | FNWYVDGVEV HNAKTKPREE QFNSTYRVVS | exchange and |
| | VLTVLHQDWL NGKEYKCKVS NKGLPSSIEK | improving |
| | TISKAKGQPR EPRVYTLPPC QEEMTKNQVS | thermostability: S228P |
| | LTCLVKGFYP SDIAVEWESN GQPENNYKTT | Substitutions for |
| | PPVLVSDGSF TLYSRLTVDK SRWQEGNVFS | reducing FcγR binding: |
| | CSVMHEALHN HYTQKSLSLS LG | S228P and L235E |

Construct 20-3

| | | |
|---|---|---|
| RVESKYGPP | (SEQ ID NO: 93) | IgG4 (IL-12 p40) |
| CPPCPAPEFE | IWELKKDVYV VELDWYPDAP GEMVVLTCDT | Heterodimerization |
| GG (SEQ ID | PEEDGITWTL DQSSEVLGSG KTLTIRVKEF | mutations: |
| NO: 4) | GDAGQYTCHK GGEVLSHSLL LLHKKEDGIW | K360E/R409W |
| | STDILKDQKE PKNKTFLRCE AKNYSGRFTC | p40 substitution: |
| | WWLTTISTDL TFSVKSSRGS SDPQGVTCGA | Y292C (native disulfide |
| | ATLSAERVRG DNKEYEYSVE CQEDSACPAA | bond between subunits |
| | EESLPIEVMV DAVHKLKYEN YTSSFFIRDI | is preserved) |
| | IKPDPPKNLQ LKPLKNSRQV EVSWEYPDTW | Substitution for |
| | STPHSYFSLT FCVQVQGKSK REKKDRVFTD | preventing Fab-Arm |
| | KTSATVICRK NASISVRAQD RCYSSSWSEW | exchange and |
| | ASVPCSRVES KYGPPCPPCP APEFEGGPSV | improving |
| | FLFPPKPKDT LMISRTPEVT CVVVDVSQED | thermostability: S228P |
| | PEVQFNWYVD GVEVHNAKTK PREEQFNSTY | Substitutions for |
| | RVVSVLTVLH QDWLNGKEYK CKVSNKGLAS | reducing FcγR binding: |
| | SIEKTISKAK GQPREPQVCT LPPSQEEMTE | S228P, L235E, P329A |
| | NQVSLTCLVK GFYPSDIAVE WESNGQPENN | |
| | YKTTPPVLDS DGSFFLYSWL TVDKSRWQEG | |
| | NVFSCSVMHE ALHNHYTQKS LSLSLG | |
| GGGGGSGGG | (SEQ ID NO: 94) | IgG4 (IL-12 p35) |
| GSGGGGSRV | RNLPVATPDP GMFPCLHHSQ NLLRAVSNML | Heterodimerization |
| ESKYGPPCPP | QKARQTLEFY PCTSEEIDHV DITKDKTSTV | mutations: |
| CPAPEFEGG | EACLPLELTK NESCLNSRET SFITNGSCLA | Q347R/D399V/F405T |
| (SEQ ID | SRKTSFMMAL CLSSIYEDLK MYQVEFKTMN | p35 substitution: |
| NO: 5) | AKLLMDPKRQ IFLDQNMLAV IDELMQALNF | V185C (native disulfide |
| | NSETVPQKSS LEEPDFYKTK IKLCILLHAF | bond between subunits |
| | RIRACTIDRV MSYLNASGGG GSGGGGSGGG | is preserved) |
| | GSRVESKYGP PCPPCPAPEF EGGPSVFLFP | Substitution for |
| | PKPKDTLMIS RTPEVTCVVV DVSQEDPEVQ | preventing Fab-Arm |
| | FNWYVDGVEV HNAKTKPREE QFNSTYRVVS | exchange and |
| | VLTVLHQDWL NGKEYKCKVS NKGLASSIEK | improving |
| | TISKAKGQPR EPRVYTLPPC QEEMTKNQVS | thermostability: S228P |
| | LTCLVKGFYP SDIAVEWESN GQPENNYKTT | Substitutions for |
| | PPVLVSDGSF TLYSRLTVDK SRWQEGNVFS | reducing FcγR binding: |
| | CSVMHEALHN HYTQKSLSLS LG | S228P, L235E, P329A |

Construct 20-4

| | | |
|---|---|---|
| RVESKYGPP | (SEQ ID NO: 95) | IgG4 (IL-12 p40) |
| CPPCPAPEFE | IWELKKDVYV VELDWYPDAP GEMVVLTCDT | Heterodimerization |
| GG (SEQ ID | PEEDGITWTL DQSSEVLGSG KTLTIRVKEF | mutations: |
| NO: 4) | GDAGQYTCHK GGEVLSHSLL LLHKKEDGIW | K360E/R409W |
| | STDILKDQKE PKNKTFLRCE AKNYSGRFTC | p40 substitution: |
| | WWLTTISTDL TFSVKSSRGS SDPQGVTCGA | Y292C (native disulfide |
| | ATLSAERVRG DNKEYEYSVE CQEDSACPAA | bond between subunits |
| | EESLPIEVMV DAVHKLKYEN YTSSFFIRDI | is preserved) |
| | IKPDPPKNLQ LKPLKNSRQV EVSWEYPDTW | Substitution for |
| | STPHSYFSLT FCVQVQGKSK REKKDRVFTD | preventing Fab-Arm |
| | KTSATVICRK NASISVRAQD RCYSSSWSEW | exchange and |
| | ASVPCSRVES KYGPPCPPCP APEFEGGPSV | improving |
| | FLFPPKPKDT LMISRTPEVT CVVVDVSQED | thermostability: S228P |
| | PEVQFNWYVD GVEVHNAKTK PREEQFNSTY | Substitutions for |
| | RVVSVLTVLH QDWLNGKEYK CKVSNKGLGS | reducing FcγR binding: |
| | SIEKTISKAK GQPREPQVCT LPPSQEEMTE | S228P, L235E, P329G |
| | NQVSLTCLVK GFYPSDIAVE WESNGQPENN | |
| | YKTTPPVLDS DGSFFLYSWL TVDKSRWQEG | |
| | NVFSCSVMHE ALHNHYTQKS LSLSLG | |
| GGGGGSGGG | (SEQ ID NO: 96) | IgG4 (IL-12 p35) |
| GSGGGGSRV | RNLPVATPDP GMFPCLHHSQ NLLRAVSNML | Heterodimerization |
| ESKYGPPCPP | QKARQTLEFY PCTSEEIDHV DITKDKTSTV | mutations: |
| CPAPEFEGG | EACLPLELTK NESCLNSRET SFITNGSCLA | Q347R/D399V/F405T |
| (SEQ ID | SRKTSFMMAL CLSSIYEDLK MYQVEFKTMN | p35 substitution: |
| NO: 5) | AKLLMDPKRQ IFLDQNMLAV IDELMQALNF | V185C (native disulfide |
| | NSETVPQKSS LEEPDFYKTK IKLCILLHAF | bond between subunits |
| | RIRACTIDRV MSYLNASGGG GSGGGGSGGG | is preserved) |
| | GSRVESKYGP PCPPCPAPEF EGGPSVFLFP | Substitution for |
| | PKPKDTLMIS RTPEVTCVVV DVSQEDPEVQ | preventing Fab-Arm |
| | FNWYVDGVEV HNAKTKPREE QFNSTYRVVS | exchange and |
| | VLTVLHQDWL NGKEYKCKVS NKGLGSSIEK | improving |
| | TISKAKGQPR EPRVYTLPPC QEEMTKNQVS | thermostability: S228P |
| | LTCLVKGFYP SDIAVEWESN GQPENNYKTT | Substitutions for |
| | PPVLVSDGSF TLYSRLTVDK SRWQEGNVFS | reducing FcγR binding: |
| | CSVMHEALHN HYTQKSLSLS LG | S228P, L235E, P329G |

Construct 20-5

| | | |
|---|---|---|
| EPKSSDKTH | (SEQ ID NO: 97) | IgG1 (IL-12 p40) |
| TCPPCPAPEL | IWELKKDVYV VELDWYPDAP GEMVVLTCDT | Heterodimerization |
| IGG (SEQ ID | PEEDGITWTL DQSSEVLGSG KTLTIRVKEF | mutations: |
| NO: 7) | GDAGQYTCHK GGEVLSHSLL LLHKKEDGIW | K360EK409W |
| | STDILKDQKE PKNKTFLRCE AKNYSGRFTC | p40 substitution: |
| | WWLTTISTDL TFSVKSSRGS SDPQGVTCGA | Y292C (native disulfide |
| | ATLSAERVRG DNKEYEYSVE CQEDSACPAA | bond between subunits |
| | EESLPIEVMV DAVHKLKYEN YTSSFFIRDI | is preserved) |
| | IKPDPPKNLQ LKPLKNSRQV EVSWEYPDTW | C220 in the upper hinge |
| | STPHSYFSLT FCVQVQGKSK REKKDRVFTD | is mutated to S |
| | KTSATVICRK NASISVRAQD RCYSSSWSEW | |
| | ASVPCSEPKS SDKTHTCPPC PAPELIGGPS | |
| | VFLFPPKPKD TLMISRTPEV TCVVVDVSHE | |
| | DPEVKFNWYV DGVEVHNAKT KPREEQYNST | |
| | YRVVSVLTVL HQDWLNGKEY KCKVSNKALP | |
| | APIEKTISKA KGQPREPQVC TLPPSRDELT | |
| | ENQVSLTCLV KGFYPSDIAV EWESNGQPEN | |
| | NYKTTPPVLD SDGSFFLYSWLTVDKSRWQQ | |
| | GNVFSCSVMH EALHNHYTQK SLSLSPG | |
| GGGGGSGGG | (SEQ ID NO: 98) | IgG1 (IL-12 p35) |
| GSGGGGSEP | RNLPVATPDP GMFPCLHHSQ NLLRAVSNML | Heterodimerization |
| KSSDKTHTC | QKARQTLEFY PCTSEEIDHV DITKDKTSTV | mutations: |
| PPCPAPELLG | EACLPLELTK NESCLNSRET SFITNGSCLA | Q347R/D399V/F405T |
| G (SEQ ID | SRKTSFMMAL CLSSIYEDLK MYQVEFKTMN | Substitution for |
| NO: 8) | AKLLMDPKRQ IFLDQNMLAV IDELMQALNF | stabilizing disulfide |
| | NSETVPQKSS LEEPDFYKTK IKLCILLHAF | bond: S354C |
| | RIRACTIDRV MSYLNASGGG GSGGGGSGGG | p35 substitution: |
| | GSEPKSSDKT HTCPPCPAPE LIGGPSVFLF | V185C (native disulfide |
| | PPKPKDTLMI SRTPEVTCVV VDVSHEDPEV | bond between subunits |
| | KFNWYVDGVE VHNAKTKPRE EQYNSTYRVV | is preserved) |
| | SVLTVLHQDW LNGKEYKCKV SNKALPAPIE | C220 in the upper hinge |
| | KTISKAKGQP REPRVYTLPPCRDELTKNQV | is mutated to S |
| | SLTCLVKGFY PSDIAVEWES NGQPENNYKT | |
| | TPPVLVSDGSFTLYSKLTVD KSRWQQGNVF | |
| | SCSVMHEALH NHYTQKSLSL SPG | |

Construct 20-6

| | | |
|---|---|---|
| EPKSSDKTH | (SEQ ID NO: 99) | IgG1 (IL-12 p40) |
| TCPPCPAPEA | IWELKKDVYV VELDWYPDAP GEMVVLTCDT | Heterodimerization |
| AGG (SEQ ID | PEEDGITWTL DQSSEVLGSG KTLTIRVKEF | mutations: |
| NO: 9) | GDAGQYTCHK GGEVLSHSLL LLHKKEDGIW | K360E/K409W |
| | STDILKDQKE PKNKTFLRCE AKNYSGRFTC | p40 substitution: |
| | WWLTTISTDL TFSVKSSRGS SDPQGVTCGA | Y292C (native disulfide |
| | ATLSAERVRG DNKEYEYSVE CQEDSACPAA | bond between subunits |
| | EESLPIEVMV DAVHKLKYEN YTSSFFIRDI | is preserved) |
| | IKPDPPKNLQ LKPLKNSRQV EVSWEYPDTW | Substitutions for |
| | STPHSYFSLT FCVQVQGKSK REKKDRVFTD | reducing FcγR binding: |
| | KTSATVICRK NASISVRAQD RCYSSSWSEW | L234A, L235A |
| | ASVPCSEPKS SDKTHTCPPC PAPEAAGGPS | C220 in the upper hinge |
| | VFLFPPKPKD TLMISRTPEV TCVVVDVSHE | is mutated to S |
| | DPEVKFNWYV DGVEVHNAKT KPREEQYNST | |
| | YRVVSVLTVLHQDWLNGKEY KCKVSNKALP | |
| | APIEKTISKA KGQPREPQVC TLPPSRDELT | |
| | ENQVSLTCLV KGFYPSDIAV EWESNGQPEN | |
| | NYKTTPPVLD SDGSFFLYSWLTVDKSRWQQ | |
| | GNVFSCSVMH EALHNHYTQK SLSLSPG | |
| GGGGGSGGG | (SEQ ID NO: 100) | IgG1 (IL-12 p35) |
| GSGGGGSEP | RNLPVATPDP GMFPCLHHSQ NLLRAVSNML | Heterodimerization |
| KSSDKTHTC | QKARQTLEFY PCTSEEIDHV DITKDKTSTV | mutations: |
| PPCPAPEAA | EACLPLELTK NESCLNSRET SFITNGSCLA | Q347R/D399V/F405T |
| GG (SEQ ID | SRKTSFMMAL CLSSIYEDLK MYQVEFKTMN | p35 substitution: |
| NO: 10) | AKLLMDPKRQ IFLDQNMLAV IDELMQALNF | V185C (native disulfide |
| | NSETVPQKSS LEEPDFYKTK IKLCILLHAF | bond between subunits |
| | RIRACTIDRV MSYLNASGGG GSGGGGSGGG | is preserved) |
| | GSEPKSSDKT HTCPPCPAPE AAGGPSVFLF | Substitutions for |
| | PPKPKDTLMI SRTPEVTCVV VDVSHEDPEV | reducing FcγR binding: |
| | KFNWYVDGVE VHNAKTKPRE EQYNSTYRVV | L234A, L235A |
| | SVLTVLHQDW LNGKEYKCKV SNKALPAPIE | C220 in the upper hinge |
| | KTISKAKGQP REPRVYTLPPCRDELTKNQV | is mutated to S |
| | SLTCLVKGFY PSDIAVEWES NGQPENNYKT | |
| | TPPVLVSDGS FTLYSKLTVD KSRWQQGNVF | |
| | SCSVMHEALH NHYTQKSLSL SPG | |

Construct 20-7

| | | |
|---|---|---|
| EPKSSDKTH | (SEQ ID NO: 101) | IgG1 (IL-12 p40) |
| TCPPCPAPEA | IWELKKDVYV VELDWYPDAP GEMVVLTCDT | Heterodimerization |
| AGG (SEQ ID | PEEDGITWTL DQSSEVLGSG KTLTIRVKEF | mutations: |
| NO: 9) | GDAGQYTCHK GGEVLSHSLL LLHKKEDGIW | K360E/K409W |
| | STDILKDQKE PKNKTFLRCE AKNYSGRFTC | p40 substitution: |
| | WWLTTISTDL TFSVKSSRGS SDPQGVTCGA | Y292C (native disulfide |
| | ATLSAERVRG DNKEYEYSVE CQEDSACPAA | bond between subunits |
| | EESLPIEVMV DAVHKLKYEN YTSSFFIRDI | is preserved) |
| | IKPDPPKNLQ LKPLKNSRQV EVSWEYPDTW | Substitutions for |
| | STPHSYFSLT FCVQVQGKSK REKKDRVFTD | reducing FcγR binding: |
| | KTSATVICRK NAS1SVRAQD RCYSSSWSEW | L234A, L235A, P329A |
| | ASVPCSEPKS SDKTHTCPPC PAPEAAGGPS | C220 in the upper hinge |
| | VFLFPPKPKD TLMISRTPEVTCVVVDVSHE | is mutated to S |
| | DPEVKFNWYV DGVEVHNAKT KPREEQYNST | |
| | YRVVSVLTVLHQDWLNGKEY KCKVSNKALA | |
| | APIEKTISKAKGQPREPQVCTLPPSRDELTENQ | |
| | VSLTCLVKGFYPSDIAVEWESNGQPENNYKTT | |
| | PPVLDSDGSFFLYSWLTVDKSRWQQGNVFSCS | |
| | VMH EALHNHYTQK SLSLSPG | |
| GGGGGSGGG | (SEQ ID NO: 102) | IgG1 (IL-12 p35) |
| GSGGGGSEP | RNLPVATPDP GMFPCLHHSQ NLLRAVSNML | Heterodimerization |
| KSSDKTHTC | QKARQTLEFY PCTSEEIDHV DITKDKTSTV | mutations: |
| PPCPAPEAA | EACLPLELTK NESCLNSRET SFITNGSCLA | Q347R/D399V/F405T |
| GG (SEQ ID | SRKTSFMMAL CLSSIYEDLK MYQVEFKTMN | p35 substitution: |
| NO: 10) | AKLLMDPKRQ IFLDQNMLAV IDELMQALNF | V185C (native disulfide |
| | NSETVPQKSS LEEPDFYKTK IKLCILLHAF | bond between subunits |
| | RIRACTIDRV MSYLNASGGGGSGGGGSGGG | is preserved) |
| | GSEPKSSDKT HTCPPCPAPEAAGGPSVFLF | Substitutions for |
| | PPKPKDTLMISRTPEVTCVVVDVSHEDPEV | reducing FcγR binding: |
| | KFNWYVDGVE VHNAKTKPRE EQYNSTYRVV | L234A, L235A, P329A |
| | SVLTVLHQDW LNGKEYKCKV SNKALAAPIE | C220 in the upper hinge |
| | KTISKAKGQP REPRVYTLPPCRDELTKNQV | is mutated to S |
| | SLTCLVKGFY PSDIAVEWES NGQPENNYKT | |
| | TPPVLVSDGS FTLYSKLTVD KSRWQQGNVF | |
| | SCSVMHEALH NHYTQKSLSL SPG | |

Construct 20-8

| | | |
|---|---|---|
| EPKSSDKTH | (SEQ ID NO: 103) | IgG1 (IL-12 p40) |
| TCPPCPAPEA | IWELKKDVYV VELDWYPDAP GEMVVLTCDT | Heterodimerization |
| AGG (SEQ ID | PEEDGITWTL DQSSEVLGSG KTLTIRVKEF | mutations: |
| NO: 9) | GDAGQYTCHK GGEVLSHSLL LLHKKEDGIW | K360EK409W |
| | STDILKDQKE PKNKTFLRCE AKNYSGRFTC | p40 substitution: |
| | WWLTTISTDL TFSVKSSRGS SDPQGVTCGA | Y292C (native disulfide |
| | ATLSAERVRG DNKEYEYSVE CQEDSACPAA | bond between subunits |
| | EESLPIEVMV DAVHKLKYEN YTSSFFIRDI | is preserved) |
| | IKPDPPKNLQ LKPLKNSRQV EVSWEYPDTW | Substitutions for |
| | STPHSYFSLT FCVQVQGKSK REKKDRVFTD | reducing FcγR binding: |
| | KTSATVICRK NASISVRAQD RCYSSSWSEW | L234A, L235A, P329G |
| | ASVPCSEPKS SDKTHTCPPC PAPEAAGGPS | C220 in the upper hinge |
| | VFLFPPKPKD TLMISRTPEVTCVVVDVSHE | is mutated to S |
| | DPEVKFNWYV DGVEVHNAKT KPREEQYNST | |
| | YRVVSVLTVLHQDWLNGKEY KCKVSNKALG | |
| | APIEKTISKA KGQPREPQVC | |
| | TLPPSRDELTENQVSLTCLV KGFYPSDIAV | |
| | EWESNGQPEN NYKTTPPVLD | |
| | SDGSFFLYSWLTVDKSRWQQ GNVFSCSVMH | |
| | EALHNHYTQK SLSLSPG | |
| GGGGGSGGG | (SEQ ID NO: 104) | IgG1 (IL-12 p35) |
| GSGGGGSEP | RNLPVATPDP GMFPCLHHSQ NLLRAVSNML | Heterodimerization |
| KSSDKTHTC | QKARQTLEFY PCTSEEIDHV DITKDKTSTV | mutations: |
| PPCPAPEAA | EACLPLELTK NESCLNSRET SFITNGSCLA | Q347R/D399V/F405T |
| GG (SEQ ID | SRKTSFMMAL CLSSIYEDLK MYQVEFKTMN | p35 substitution: |
| NO: 10) | AKLLMDPKRQ IFLDQNMLAV IDELMQALNF | V185C (native disulfide |
| | NSETVPQKSS LEEPDFYKTK IKLCILLHAF | bond between subunits |
| | RIRACTIDRV MSYLNASGGGGSGGGGSGGG | is preserved) |
| | GSEPKSSDKT HTCPPCPAPEAAGGPSVFLF | Substitutions for |
| | PPKPKDTLMI SRTPEVTCVV VDVSHEDPEV | reducing FcγR binding: |
| | KFNWYVDGVE VHNAKTKPRE EQYNSTYRVV | L234A, L235A, P329G |
| | SVLTVLHQDW LNGKEYKCKV SNKALGAPIE | C220 in the upper hinge |
| | KTISKAKGQP REPRVYTLPPCRDELTKNQV | is mutated to S |
| | SLTCLVKGFY PSDIAVEWES NGQPENNYKT | |
| | TPPVLVSDGS FTLYSKLTVD KSRWQQGNVF | |
| | SCSVMHEALH NHYTQKSLSL SPG | |

Construct 20-9

| | | |
|---|---|---|
| EPKSSDKTH | (SEQ ID NO: 105) | IgG1 (IL-12 p40) |
| TCPPCPAPEA | IWELKKDVYV VELDWYPDAP GEMVVLTCDT | Heterodimerization |
| EGA (SEQ ID | PEEDGITWTL DQSSEVLGSG KTLTIRVKEF | mutations: |
| NO: 11) | GDAGQYTCHK GGEVLSHSLL LLHKKEDGIW | K360E/K409W |
| | STDILKDQKE PKNKTFLRCE AKNYSGRFTC | p40 substitution: |
| | WWLTTISTDL TFSVKSSRGS SDPQGVTCGA | Y292C (native disulfide |
| | ATLSAERVRG DNKEYEYSVE CQEDSACPAA | bond between subunits |
| | EESLPIEVMV DAVHKLKYEN YTSSFFIRDI | is preserv ed) |
| | IKPDPPKNLQ LKPLKNSRQV EVSWEYPDTW | Substitutions for |
| | STPHSYFSLT FCVQVQGKSK REKKDRVFTD | reducing FcγR and C1q |
| | KTSATVICRK NASISVRAQD RCYSSSWSEW | binding: L234A, |
| | ASVPCSEPKS SDKTHTCPPC PAPEAEGAPS | L235E, G237A, |
| | VFLFPPKPKD TLMISRTPEV TCVVVDVSHE | A330S, P331S |
| | DPEVKFNWYV DGVEVHNAKT KPREEQYNST | C220 in the upper hinge |
| | YRVVSVLTVL HQDWLNGKEY KCKVSNKALP | is mutated to S |
| | SSIEKTISKA KGQPREPQVC TLPPSRDELT | |
| | ENQVSLTCLV KGFYPSDIAV EWESNGQPEN | |
| | NYKTTPPVLD SDGSFFLYSWLTVDKSRWQQ | |
| | GNVFSCSVMH EALHNHYTQK SLSLSPG | |
| GGGGGSGGG | (SEQ ID NO: 106) | IgG1 (IL-12 p35) |
| GSGGGGSEP | RNLPVATPDP GMFPCLHHSQ NLLRAVSNML | Heterodimerization |
| KSSDKTHTC | QKARQTLEFY PCTSEEIDHV DITKDKTSTV | mutations: |
| PPCPAPEAEG | EACLPLELTK NESCLNSRET SFITNGSCLA | Q347R/D399V/F405T |
| A (SEQ ID | SRKTSFMMAL CLSSIYEDLK MYQVEFKTMN | p35 substitution: |
| NO: 12) | AKLLMDPKRQ IFLDQNMLAV IDELMQALNF | V185C (native disulfide |
| | NSETVPQKSS LEEPDFYKTK IKLCILLHAF | bond between subunits |
| | RIRACTIDRV MSYLNASGGG GSGGGGSGGG | is preserved) |
| | GSEPKSSDKT HTCPPCPAPE AEGAPSVFLF | Substitutions for |
| | PPKPKDTLMISRTPEVTCVV VDVSHEDPEV | reducing FcγR and C1q |
| | KFNWYVDGVE VHNAKTKPRE EQYNSTYRVV | binding: L234A, |
| | SVLTVLHQDW LNGKEYKCKV SNKALPSSIE | L235E, G237A, |
| | KTISKAKGQP REPRVYTLPP CRDELTKNQV | A330S, P33IS |
| | SLTCLVKGFY PSDIAVEWES NGQPENNYKT | C220 in the upper hinge |
| | TPPVLVSDGS FTLYSKLTVD KSRWQQGNVF | is mutated to S |
| | SCSVMHEALH NHYTQKSLSL SPG | |

Construct 21

| | | |
|---|---|---|
| EPKSSDKTH | (SEQ ID NO: 57) | IgG1 (IL-12 p40) |
| TCPPCPAPEA | IWELKKDVYV VELDWYPDAP GEMVVLTCDT | Heterodimerization |
| AGG (SEQ ID | PEEDGITWTL DQSSEVLGSG KTLTIRVKEF | mutations: |
| NO: 9) | GDAGQYTCHK GGEVLSHSLL LLHKKEDGIW | K360E/K409W |
| | STDILKDQKE PKNKTFLRCE AKNYSGRFTC | Substitution for |
| | WWLTTISTDL TFSVKSSRGS SDPQGVTCGA | stabilizing disulfide |
| | ATLSAERVRG DNKEYEYSVE CQEDSACPAA | bond: Y349C |
| | EESLPIEVMV DAVHKLKYEN YTSSFFIRDI | Substitutions for |
| | IKPDPPKNLQ LKPLKNSRQV EVSWEYPDTW | reducing FcγR binding: |
| | STPHSYFSLT FCVQVQGKSK REKKDRVFTD | L234A, L235A |
| | KTSATVICRK NASISVRAQD RCYSSSWSEW | Additional mutation in |
| | ASVPCSEPKS SDKTHTCPPC PAPEAAGGPS | p40: Y292C to |
| | VFLFPPKPKD TLMISRTPEV TCVVVDVSHE | introduce IL-12 |
| | DPEVKFNWYV DGVEVHNAKT KPREEQYNST | stabilizing disulfide |
| | YRVVSVLTVL HQDWLNGKEY KCKVSNKALP | bond |
| | APIEKTISKA KGQPREPQVC TLPPSRDELT | C220 in the upper hinge |
| | ENQVSLTCLV KGFYPSDIAV EWESNGQPEN | is mutated to S |
| | NYKTTPPVLD SDGSFFLYSW LTVDKSRWQQ | |
| | GNVFSCSVMH EALHNHYTQK SLSLSPG | |
| GGGGGSGGG | (SEQ ID NO: 58) | IgG1 (IL-12 p35) |
| GSGGGGSEP | RNLPVATPDP GMFPCLHHSQ NLLRAVSNML | Heterodimerization |
| KSSDKTHTC | QKARQTLEFY PCTSEEIDHV DITKDKTSTV | mutations: |
| PPCPAPEAA | EACLPLELTK NESCLNSRET SFITNGSCLA | Q347R/D399V/F405T |
| GG (SEQ ID | SRKTSFMMAL CLSSIYEDLK MYQVEFKTMN | Substitution for |
| NO: 10) | AKLLMDPKRQ IFLDQNMLAV IDELMQALNF | stabilizing disulfide |
| | NSETVPQKSS LEEPDFYKTK IKLCILLHAF | bond: S354C |
| | RIRACTIDRV MSYLNASGGG GSGGGGSGGG | Substitutions for |
| | GSEPKSSDKT HTCPPCPAPE AAGGPSVFLF | reducing FcγR binding: |
| | PPKPKDTLMI SRTPEVTCVV VDVSHEDPEV | L234A, L235A |
| | KFNWYVDGVE VHNAKTKPRE EQYNSTYRVV | Additional mutation in |
| | SVLTVLHQDW LNGKEYKCKV SNKALPAPIE | p35: V185C to |
| | KTISKAKGQP REPRVYTLPPCRDELTKNQV | introduce IL-12 |
| | SLTCLVKGFY PSDIAVEWES NGQPENNYKT | stabilizing disulfide |
| | TPPVLVSDGS FTLYSKLTVD KSRWQQGNVF | bond |
| | SCSVMHEALH NHYTQKSLSL SPG | C220 in the upper hinge |
| | | is mutated to S |

Construct 22

| | | |
|---|---|---|
| EPKSSDKTH | (SEQ ID NO: 59) | IgG1 (IL-12 p40) |
| TCPPCPAPEA | IWELKKDVYV VELDWYPDAP GEMVVLTCDT | Heterodimerization |
| AGG (SEQ ID | PEEDGITWTL DQSSEVLGSG KTLTIRVKEF | mutations: |
| NO: 9) | GDAGQYTCHK GGEVLSHSLL LLHKKEDGIW | K360E/K409W |
| | STDILKDQKE PKNKTFLRCE AKNYSGRFTC | Substitution for |
| | WWLTTISTDL TFSVKSSRGS SDPQGVTCGA | stabilizing disulfide |
| | ATLSAERVRG DNKEYEYSVE CQEDSACPAA | bond: Y349C |
| | EESLPIEVMV DAVHKLKYEN YTSSFFIRDI | Substitutions for |
| | IKPDPPKNLQ LKPLKNSRQV EVSWEYPDTW | reducing FcγR binding: |
| | STPHSYFSLT FCVQVQGKSK REKKDRVFTD | L234A, L235A, P329A |
| | KTSATVICRK NASISVRAQD | Additional mutation |
| | RCYSSSWSEW ASVPCSEPKS SDKTHTCPPC | Y292C to introduce IL- |
| | PAPEAAGGPS VFLFPPKPKD TLMISRTPEV | 12 stabilizing disulfide |
| | TCVVVDVSHEDPEVKFNWYVDGVEVHNAKT | bond |
| | KPREEQYNST YRVVSVLTVLHQDWLNGKEY | C220 in the upper hinge |
| | KCKVSNKALA APIEKTISKA KGQPREPQVC | is mutated to S |
| | TLPPSRDELTENQVSLTCLV KGFYPSDIAV | |
| | EWESNGQPENNYKTTPPVLDSDGSFFLYSWLT | |
| | VDKSRWQQ GNVFSCSVMH EALHNHYTQK | |
| | SLSLSPG | |
| GGGGGSGGG | (SEQ ID NO: 60) | IgG1 (IL-12 p35) |
| GSGGGGSEP | RNLPVATPDP GMFPCLHHSQ NLLRAVSNML | Heterodimerization |
| KSSDKTHTC | QKARQTLEFY PCTSEEIDHV DITKDKTSTV | mutations: |
| PPCPAPEAA | EACLPLELTK NESCLNSRET SFITNGSCLA | Q347R/D399V/F405T |
| GG (SEQ ID | SRKTSFMMAL CLSSIYEDLK MYQVEFKTMN | Substitution for |
| NO: 10) | AKLLMDPKRQ IFLDQNMLAV IDELMQALNF | stabilizing disulfide |
| | NSETVPQKSS LEEPDFYKTK IKLCILLHAF | bond: S354C |
| | RIRACTIDRV MSYLNASGGG GSGGGGSGGG | Substitutions for |
| | GSEPKSSDKT HTCPPCPAPE AAGGPSVFLF | reducing FcγR binding: |
| | PPKPKDTLMISRTPEVTCVV VDVSHEDPEV | L234A, L235A, P329A |
| | KFNWYVDGVEVHNAKTKPREEQYNSTYRVV | Additional mutation |
| | SVLTVLHQDW LNGKEYKCKV SNKALAAPIE | V185C to introduce IL- |
| | KTISKAKGQP REPRVYTLPP CRDELTKNQV | 12 stabilizing disulfide |
| | SLTCLVKGFY PSDIAVEWES NGQPENNYKT | bond |
| | TPPVLVSDGS FTLYSKLTVD KSRWQQGNVF | C220 in the upper hinge |
| | SCSVMHEALH NHYTQKSLSL SPG | is mutated to S |

Construct 23

| | | |
|---|---|---|
| EPKSSDKTH | (SEQ ID NO: 61) | IgG1 (IL-12 p40) |
| TCPPCPAPEA | IWELKKDVYV VELDWYPDAP GEMVVLTCDT | Heterodimerization |
| EGA (SEQ ID | PEEDGITWTL DQSSEVLGSG KTLTIRVKEF | mutations: |
| NO: 11) | GDAGQYTCHK GGEVLSHSLL LLHKKEDGIW | K360E/K409W |
| | STDILKDQKE PKNKTFLRCE AKNYSGRFTC | Substitution for |
| | WWLTTISTDL TFSVKSSRGS SDPQGVTCGA | stabilizing disulfide |
| | ATLSAERVRG DNKEYEYSVE CQEDSACPAA | bond: Y349C |
| | EESLPIEVMV DAVHKLKYEN YTSSFFIRDI | Substitutions for |
| | IKPDPPKNLQ LKPLKNSRQV EVSWEYPDTW | reducing FcγR and C1q |
| | STPHSYFSLT FCVQVQGKSK REKKDRVFTD | binding: L234A, |
| | KTSATVICRK NASISVRAQD RCYSSSWSEW | L235E, G237A, |
| | ASVPCSEPKS SDKTHTCPPC PAPEAEGAPS | A330S, P331S |
| | VFLFPPKPKD TLMISRTPEVTCVVVDVSHE | Additional mutation |
| | DPEVKFNWYV DGVEVHNAKT KPREEQYNST | Y292C to introduce IL- |
| | YRVVSVLTVLHQDWLNGKEY KCKVSNKALP | 12 stabilizing disulfide |
| | SSIEKTISKA KGQPREPQVC TLPPSRDELT | bond |
| | ENQVSLTCLV KGFYPSDIAV EWESNGQPEN | C220 in the upper hinge |
| | NYKTTPPVLD SDGSFFLYSWLTVDKSRWQQ | is mutated to S |
| | GNVFSCSVMH EALHNHYTQK SLSLSPG | |
| GGGGGSGGG | (SEQ ID NO: 62) | IgG1 (IL-12 p35) |
| GSGGGGSEP | RNLPVATPDP GMFPCLHHSQ NLLRAVSNML | Heterodimerization |
| KSSDKTHTC | QKARQTLEFY PCTSEEIDHV DITKDKTSTV | mutations: |
| PPCPAPEAEG | EACLPLELTK NESCLNSRET SFITNGSCLA | Q347R/D399V/F405T |
| A (SEQ ID | SRKTSFMMAL CLSSIYEDLK MYQVEFKTMN | Substitution for |
| NO: 12) | AKLLMDPKRQ IFLDQNMLAV IDELMQALNF | stabilizing disulfide |
| | NSETVPQKSS LEEPDFYKTK IKLCILLHAF | bond: S354C |
| | RIRACTIDRV MSYLNASGGG GSGGGGSGGG | Substitutions for |
| | GSEPKSSDKT HTCPPCPAPE AEGAPSVFLF | reducing FcγR and C1q |
| | PPKPKDTLMISRTPEVTCVV VDVSHEDPEV | binding: L234A, |
| | KFNWYVDGVE VHNAKTKPRE EQYNSTYRVV | L235E, G237A, |
| | SVLTVLHQDW LNGKEYKCKV SNKALPSSIE | A330S, P331S |
| | KTISKAKGQP REPRVYTLPP CRDELTKNQV | Additional mutation |
| | SLTCLVKGFY PSDIAVEWES NGQPENNYKT | V185C to introduce IL- |
| | TPPVLVSDGS FTLYSKLTVD KSRWQQGNVF | 12 stabilizing disulfide |
| | SCSVMHEALH NHYTQKSLSL SPG | bond C220 in |
| | | the upper hinge |
| | | is mutated to S |

*The amino acid sequences can further comprise a lysine (K) at the C-terminus.

### IL-12 Subunits

[0182] IL-12 is a multisubunit protein including a p40 subunit and a p35 subunit. The amino acid sequence of mature wild-type IL-12 p40 is amino acids 23-328 of the GenBank Accession No. NP_002178.2, set forth in SEQ ID NO:127 below. The amino acid sequence of mature wild-type IL-12 p35 is amino acids 57-253 of GenBank Accession No. NP_000873.2, set forth in SEQ ID NO:128 below. The numbering of amino acid residues of p40 and p35 used herein corresponds to the mature wild-type protein sequences. As used herein, an IL-12 p40 subunit comprises an amino acid sequence at least 90% (e.g., at least 91%, 92%, 93%, 94%, 95%, 96%, 97%, 98%, or 99%) identical to SEQ ID NO:127. As used herein, an IL-12 p35 subunit comprises an amino acid sequence at least 90% (e.g., at least 91%, 92%, 93%, 94%, 95%, 96%, 97%, 98%, or 99%) identical to SEQ ID NO:128.

[0183] In certain embodiments of any one of the foregoing aspects, the p40 and p35 subunits of IL-12 comprise the amino acid sequences of SEQ ID NOs: 121 and 122; 127 and 128; 201 and 202; 203 and 204; 123 and 124; or 125 and 126, respectively. In certain embodiments, the first polypeptide comprises the amino acid sequence of a p40 subunit of IL-12, and the second polypeptide comprises the amino acid sequence of a p35 subunit of IL-12. In certain embodiments, the first polypeptide comprises the amino acid sequence of a p35 subunit of IL-12, and the second polypeptide comprises the amino acid sequence of a p40 subunit of IL-12.

[0184] In certain embodiments, the present disclosure includes a heterodimeric Fc-fused protein comprising: a first polypeptide comprising a first antibody Fc domain polypeptide and a second polypeptide comprising a second antibody Fc domain polypeptide, wherein the first polypeptide further comprises a first subunit of IL-12 fused to the first antibody Fc domain polypeptide by a linker; and a second, different subunit of IL-12 is fused to the second antibody Fc domain polypeptide, wherein the first and second, different subunits of IL-12 are bound to each other, wherein the first antibody Fc domain polypeptide and the second antibody Fc domain polypeptide each contain different mutations promoting heterodimerization, wherein the first antibody Fc domain polypeptide and the second antibody Fc domain polypeptide are bound to each other, and wherein the first subunit of IL-12 is a p40 subunit with a Y292C substitution, and the second, different subunit of IL-12 is a p35 subunit with a V185C substitution. In certain embodiments, the first subunit and second, different subunit of IL-12 comprise the amino acid sequences of SEQ ID NOs: 125 and 126, respectively.

[0185] The first subunit and second, different subunit of IL-12 can be fused to any of the antibody Fc domain polypeptides via any linkers disclosed herein to form Fc-fused proteins having sequences including but not limited to Constructs 120, 120-1, 120-2, 120-3, 120-4, 120-5, 120-6, and 120-7 as described in Table 4 and Constructs 20, 20-1, 20-2, 20-3, 20-4, 20-5, 20-6, 20-7, 20-8, and 20-9 as described in Table 5.

[0186] In certain embodiments, the p40 subunit of IL-12 further comprises a replacement of C177, and the p35 subunit of IL-12 further comprises a replacement of C74. In certain embodiments, C177 in the p40 subunit of IL-12 is replaced by S, and C74 in the p35 subunit of IL-12 is replaced by S. In certain embodiments, the p40 and p35 subunits of IL-12 comprise the amino acid sequences of SEQ ID NOs: 123 and 124, respectively.

[0187] The first subunit and second, different subunit of IL-12 can be fused to any of the antibody Fc domain polypeptides via any linkers disclosed herein to form Fc-fused proteins having sequences including but not limited to Constructs 119, 119-1, 119-2, 119-3, 119-4, 119-5, 119-6, 119-7, and 119-8 as described in Table 4, and Constructs 19, 19-1, 19-2, 19-3, 19-4, 19-5, 19-6, 19-7, 19-8, 19-9, and 19-10 as described in Table 5.

TABLE 6
Human IL-12 p40 and p35
amino acid sequences

| | |
|---|---|
| IL-12 p40 | IL-12 p35 |
| Human IL-12 | Human IL-12 |
| p40 wild-type | p35 wild-type |
| IWELKKDVYV | RNLPVATPDP |
| VELDWYPDAP | GMFPCLHHSQ |
| GEMVVLTCDT | NLLRAVSNML |
| PEEDGITWTL | QKARQTLEFY |
| DQSSEVLGSG | PCTSEEIDHE |
| KTLTIQVKEF | DITKDKTSTV |
| GDAGQYTCHK | EACLPLELTK |
| GGEVLSHSLL | NESCLNSRET |
| LLHKKEDGIW | SFITNGSCLA |
| STDILKDQKE | SRKTSFMMAL |
| PKNKTFLRCE | CLSSIYEDLK |
| AKNYSGRFTC | MYQVEFKTMN |
| WWLTTISTDL | AKLLMDPKRQ |
| TFSVKSSRGS | IFLDQNMLAV |
| SDPQGVTCGA | IDELMQALNF |
| ATLSAERVRG | NSETVPQKSS |
| DNKEYEYSVE | LEEPDFYKTK |
| CQEDSACPAA | IKLCILLHAF |
| EESLPIEVMV | RIRAVTIDRV |
| DAVHKLKYEN | MSYLNAS |
| YTSSFFIRDI | (SEQ ID |
| IKPDPPKNLQ | NO: 128) |
| LKPLKNSRQV | |
| EVSWEYPDTW | |
| STPHSYFSLT | |
| FCVQVQGKSK | |
| REKKDRVFTD | |
| KTSATVICRK | |
| NASISVRAQD | |
| RYYSSSWSEW | |
| ASVPCS | |
| (SEQ ID | |
| NO: 127) | |
| Human IL-12 | Human IL-12 |
| p40 C177S | p35 C74S |
| Y292C | V185C |
| IWELKKDVYV | RNLPVATPDP |
| VELDWYPDAP | GMFPCLHHSQ |
| GEMVVLTCDT | NLLRAVSNML |
| PEEDGITWTL | QKARQTLEFY |
| DQSSEVLGSG | PCTSEEIDHE |
| KTLTIQVKEF | DITKDKTSTV |
| GDAGQYTCHK | EACLPLELTK |
| GGEVLSHSLL | NESSLNSRET |
| LLHKKEDGIW | SFITNGSCLA |
| STDILKDQKE | SRKTSFMMAL |
| PKNKTFLRCE | CLSSIYEDLK |
| AKNYSGRFTC | MYQVEFKTMN |
| WWLTTISTDL | AKLLMDPKRQ |
| TFSVKSSRGS | IFLDQNMLAV |
| SDPQGVTCGA | IDELMQALNF |
| ATLSAERVRG | NSETVPQKSS |
| DNKEYEYSVE | LEEPDFYKTK |
| CQEDSASPAA | IKLCILLHAF |
| EESLPIEVMV | RIRACTIDRV |
| DAVHKLKYEN | MSYLNAS |
| YTSSFFIRDI | (SEQ ID |
| IKPDPPKNLQ | NO: 202) |
| LKPLKNSRQV | |
| EVSWEYPDTW | |
| STPHSYFSLT | |
| FCVQVQGKSK | |
| REKKDRVFTD | |
| KTSATVICRK | |
| NASISVRAQD | |
| RCYSSSWSEW | |
| ASVPCS | |
| (SEQ ID | |
| NO: 201) | |
| Human IL-12 | Human IL-12 |
| p40 Y292C | p35 VI85C |
| IWELKKDVYV | RNLPVATPDP |
| VELDWYPDAP | GMFPCLHHSQ |
| GEMVVLTCDT | NLLRAVSNML |
| PEEDGITWTL | QKARQTLEFY |
| DQSSEVLGSG | PCTSEEIDHE |
| KTLTIQVKEF | DITKDKTSTV |
| GDAGQYTCHK | EACLPLELTK |
| GGEVLSHSLL | NESCLNSRET |
| LLHKKEDGIW | SFITNGSCLA |
| STDILKDQKE | SRKTSFMMAL |
| PKNKTFLRCE | CLSSIYEDLK |
| AKNYSGRFTC | MYQVEFKTMN |
| WWLTTISTDL | AKLLMDPKRQ |
| TFSVKSSRGS | IFLDQNMLAV |
| SDPQGVTCGA | IDELMQALNF |
| ATLSAERVRG | NSETVPQKSS |
| DNKEYEYSVE | LEEPDFYKTK |
| CQEDSACPAA | IKLCILLHAF |
| EESLPIEVMV | RIRACTIDRV |
| DAVHKLKYEN | MSYLNAS |
| YTSSFFIRDI | (SEQ ID |
| IKPDPPKNLQ | NO: 204) |
| LKPLKNSRQV | |
| EVSWEYPDTW | |
| STPHSYFSLT | |
| FCVQVQGKSK | |
| REKKDRVFTD | |
| KTSATVICRK | |
| NASISVRAQD | |
| RCYSSSWSEW | |
| ASVPCS | |
| (SEQ ID | |
| NO: 203) | |
| Human IL-12 | Human IL-12 |
| p40 Q56R | p35 E50V |
| IWELKKDVYV | RNLPVATPDP |
| VELDWYPDAP | GMFPCLHHSQ |
| GEMVVLTCDT | NLLRAVSNML |
| PEEDGITWTL | QKARQTLEFY |
| DQSSEVLGSG | PCTSEEIDHV |
| KTLTIRVKEF | DITKDKTSTV |
| GDAGQYTCHK | EACLPLELTK |
| GGEVLSHSLL | NESCLNSRET |
| LLHKKEDGIW | SFITNGSCLA |
| STDILKDQKE | SRKTSFMMAL |
| PKNKTFLRCE | CLSSIYEDLK |
| AKNYSGRFTC | MYQVEFKTMN |
| WWLTTISTDL | AKLLMDPKRQ |
| TFSVKSSRGS | IFLDQNMLAV |
| SDPQGVTCGA | IDELMQALNF |
| ATLSAERVRG | NSETVPQKSS |
| DNKEYEYSVE | LEEPDFYKTK |
| CQEDSACPAA | IKLCILLHAF |
| EESLPIEVMV | RIRAVTIDRV |
| DAVHKLKYEN | MSYLNAS |
| YTSSFFIRDI | (SEQ ID |
| IKPDPPKNLQ | NO: 122) |
| LKPLKNSRQV | |
| EVSWEYPDTW | |
| STPHSYFSLT | |
| FCVQVQGKSK | |
| REKKDRVFTD | |
| KTSATVICRK | |
| NASISVRAQD | |
| RYYSSSWSEW | |
| ASVPCS | |
| (SEQ ID | |
| NO: 121) | |
| Human IL-12 | Human IL-12 |
| p40 | p35 E50V |
| Q56R | C74S V185C |
| C177S Y292C | RNLPVATPDP |
| IWELKKDVYV | GMFPCLHHSQ |
| VELDWYPDAP | NLLRAVSNML |
| GEMVVLTCDT | QKARQTLEFY |
| PEEDGITWTL | PCTSEEIDHV |
| DQSSEVLGSG | DITKDKTSTV |
| KTLTIRVKEF | EACLPLELTK |
| GDAGQYTCHK | NESSLNSRET |
| GGEVLSHSLL | SFITNGSCLA |
| LLHKKEDGIW | SRKTSFMMAL |
| STDILKDQKE | CLSSIYEDLK |
| PKNKTFLRCE | MYQVEFKTMN |
| AKNYSGRFTC | AKLLMDPKRQ |
| WWLTTISTDL | IFLDQNMLAV |
| TFSVKSSRGS | IDELMQALNF |
| SDPQGVTCGA | NSETVPQKSS |
| ATLSAERVRG | LEEPDFYKTK |
| DNKEYEYSVE | IKLCILLHAF |
| CQEDSASPAA | RIRACTIDRV |
| EESLPIEVMV | MSYLNAS |
| DAVHKLKYEN | (SEQ ID |
| YTSSFFIRDI | NO: 124) |
| IKPDPPKNLQ | |
| LKPLKNSRQV | |
| EVSWEYPDTW | |
| STPHSYFSLT | |
| FCVQVQGKSK | |
| REKKDRVFTD | |
| KTSATVICRK | |
| NASISVRAQD | |
| RCYSSSWSEW | |
| ASVPCS | |
| (SEQ ID | |
| NO: 123) | |
| Human IL-12 | Human IL-12 |
| p40 Q56R | p35 E50V |
| Y292C | V185C |
| IWELKKDVYV | RNLPVATPDP |
| VELDWYPDAP | GMFPCLHHSQ |
| GEMVVLTCDT | NLLRAVSNML |
| PEEDGITWTL | QKARQTLEFY |
| DQSSEVLGSG | PCTSEEIDHV |
| KTLTIRVKEF | DITKDKTSTV |
| GDAGQYTCHK | EACLPLELTK |
| GGEVLSHSLL | NESCLNSRET |
| LLHKKEDGIW | SFITNGSCLA |
| STDILKDQKE | SRKTSFMMAL |
| PKNKTFLRCE | CLSSIYEDLK |
| AKNYSGRFTC | MYQVEFKTMN |
| WWLTTISTDL | AKLLMDPKRQ |
| TFSVKSSRGS | IFLDQNMLAV |
| SDPQGVTCGA | IDELMQALNF |
| ATLSAERVRG | NSETVPQKSS |
| DNKEYEYSVE | LEEPDFYKTK |
| CQEDSACPAA | IKLCILLHAF |
| EESLPIEVMV | RIRACTIDRV |
| DAVHKLKYEN | MSYLNAS |
| YTSSFFIRDI | (SEQ ID |
| IKPDPPKNLQ | NO: 126) |
| LKPLKNSRQV | |
| EVSWEYPDTW | |
| STPHSYFSLT | |
| FCVQVQGKSK | |
| REKKDRVFTD | |
| KTSATVICRK | |
| NASISVRAQD | |
| RCYSSSWSEW | |
| ASVPCS | |
| (SEQ ID | |
| NO: 125) | |

[0188] In certain embodiments, a heterodimeric Fc-fused protein of the present invention comprises a first polypeptide comprising the amino acid sequence of SEQ ID NO:290 and a second polypeptide comprising the amino acid sequence of SEQ ID NO:291. In certain embodiments, the heterodimeric Fc-fused protein of the present invention comprising SEQ ID NO:290 and SEQ ID NO:291 comprises a Y349C mutation in the CH3 domain of the first antibody Fc domain polypeptide and a S354C mutation in the CH3 domain of the second antibody Fc domain polypeptide. In certain embodiments, the heterodimeric Fc-fused protein of the present invention comprising SEQ ID NO:290 and SEQ ID NO:291 comprise different mutations in the respective Fc domain polypeptide sequences for promoting heterodimerization between the Fc domains.

[0189] In certain embodiments, the first polypeptide sequence comprises a first antibody Fc domain polypeptide (human IgG1) sequence comprising K360E and K409W substitutions. In certain embodiments, the second polypeptide sequence comprises a second antibody Fc domain polypeptide (human IgG1) sequence comprising Q347R, D399V, and F405T substitutions. In certain embodiments, the first polypeptide and second polypeptide amino acid sequences comprise one or more mutations for reducing effector functions. In certain embodiments, the heterodimeric Fc-fused protein of the present invention comprises LALAPA (L234A, L235A, and P329A) mutations.

[0190] In certain embodiments, in the first polypeptide of the heterodimeric Fc-fused protein of the present invention (SEQ ID NO:290), the p40 subunit of human IL-12 is fused to the first antibody Fc domain polypeptide by a first linker comprising a first amino acid sequence, and in the second polypeptide of the heterodimeric Fc-fused protein of the present invention (SEQ ID NO:291), the p35 subunit of human IL-12 is fused to the second antibody Fc domain polypeptide by a second linker comprising a second amino acid sequence.

[0191] SEQ ID NO:290 is a sequence of p40 subunit of human IL-12 (underlined amino acids) fused to human IgG1 Fc domain polypeptide. Mutations are shown in bold.

(SEQ ID NO: 290)
IWELKKDVYVVELDWYPDAPGEMVVLTCDTPEEDG
ITWTLDQSSEVLGSGKTLTIQVKEFGDAGQYTCHK
GGEVLSHSLLLLHKKEDGIWSTD1LKDQKEPKNKT
FLRCEAKNYSGRFTCWWLTTISTDLTFSVKSSRGS
SDPQGVTCGAATLSAERVRGDNKEYEYSVECQEDS
ACPAAEESLPIEVMVDAVHKLKYENYTSSFFIRDI
IKPDPPKNLQLKPLKNSRQVEVSWEYPDTWSTPHS
YFSLTFCVQVQGKSKREKKDRVFTDKTSATVICRK
NASISVRAQDRYYSSSWSEWASVPCSPKSSDKTHT
CPPCPAPEAAGGPSVFLIPPKPKDTLMISRTPE
VTCVVVDVSHEDPEVKFNWYVDGVEVHNAKTKPRE
EQYNSTYRVVSVLTVLHQDWLNGKEYKCKVSNKAL
AAPIEKTISKAKGQPREPQVCTLPPSRDELTENQV
SLTCLVKGFYPSDIAVEWESNGQPENNYKTTPPVL
DSDGSFFLYSWLTVDKSRWQQGNVFSCSVMHEALH
NHYTQKSLSLSPG

[0192] SEQ ID NO:291 is a sequence of p35 subunit of human IL-12 (underlined amino acids) fused to human IgG1 Fc domain polypeptide. Mutations are shown in bold.

(SEQ ID NO: 291)
RNLPVATPDPGMFPCLHHSQNLLRAVSNMLQKARQT
LEFYPCTSEEIDHEDITKDKTSTVEACLPLELTKN
ESCLNSRETSFITNGSCLASRKTSFMMALCLSSIY
EDLKMYQVEFKTMNAKLLMDPKRQIFLDQNMLAVI
DELMQALNFNSETVPQKSSLEEPDFYKTKIKLCIL
LHAFRIRAVTIDRVMSYLNASGGGGSGGGGSGGGG
SEPKSSDKTHTCPPCPAPEAAGGPSVFLFPPKPKD
TLMISRTPEVTCVVVDVSHEDPEVKFNWYVDGVEV
HNAKTKPREEQYNSTYRVVSVLTVLHQDWLNGKEY
KCKVSNKALAAPIEKTISKAKGQPREPRVYTLPPC
RDELTKNQVSLTCLVKGFYPSDIAVEWESNGQPEN
NYKTTPPVLVSDGSFTLYSKLTVDKSRWQQGNVFS
CSVMHEALHNHYTQKSLSLSPG

[0193] The first and second polypeptides represented by amino acid sequences SEQ ID NO:290 and SEQ ID NO:291, respectively, form a disulfide bond due to a Y349C mutation in the CH3 domain of the first antibody Fc domain polypeptide sequence (human IgG1) in SEQ ID NO:290 (bolded and underlined) and a S354C mutation in the CH3 domain of the second antibody Fc domain polypeptide sequence (human IgG1) in SEQ ID NO:291 (bolded and underlined), which imparts stability to the heterodimeric Fc-fused protein (Fc numbering according to the EU system).

[0194] For promoting heterodimerization between the two Fc domain polypeptides of the heterodimeric Fc-fused protein, the first antibody Fc domain polypeptide sequence (human IgG1) in SEQ ID NO:290 includes K360E and K409W substitutions in the CH3 domain, and the second, different Fc domain polypeptide sequence (human IgG1) in SEQ ID NO:291 includes Q347R, D399V, and F405T substitutions in the CH3 domain (Fc numbering according to the EU system).

[0195] The first antibody Fc domain polypeptide sequence and the second, different Fc domain polypeptide sequence (human IgG1) in SEQ ID NO:290 and SEQ ID NO:291 also include L234A, L235A, and P329A (LALAPA) mutations for reducing effector functions.

### Spacer Peptides

[0196] Exemplary spacer peptide sequences are provided in Table 7, and exemplary full length linker sequences are provided in Tables 4 and 5.

[0197] Within the first polypeptide of the present invention, a first subunit of a multisubunit protein is fused via a linker to a first antibody Fc domain polypeptide (e.g., an IgG4 antibody Fc variant sequence or an IgG1 antibody Fc variant sequence, as disclosed in Table 2), in an amino-to-carboxyl direction. And within the second polypeptide of the present invention, a second, different subunit of a multisubunit protein is fused via a linker to a second antibody Fc domain polypeptide (e.g., an IgG4 antibody Fc variant sequence or an IgG1 antibody Fc variant sequence, as disclosed in Table 2), in an amino-to-carboxyl direction.

[0198] In some embodiments, the first subunit of a multisubunit protein of the present invention is fused via a linker to a first antibody Fc domain sequence, wherein the linker comprises or consists of a spacer peptide L₁ and the amino acid sequence of SEQ ID NO:1, 2, 4, 6, 7, 9, 11, 237, 238, 239, or 240. In some embodiments, the second, different subunit of the multisubunit protein is fused to a second antibody Fc domain polypeptide via a linker, wherein the linker comprises or consists of a spacer peptide L₂ and the amino acid sequence of SEQ ID NO:1, 2, 4, 6, 7, 9, 11, 237, 238, 239, or 240.

[0199] In certain embodiments, L₁ and L₂ are peptide linkers, for example, L₁ and/or L₂ include(s) 4-50 amino acid residues. In certain embodiments, L₁ consists of 4-50 amino acid residues. In certain embodiments, L₁ consists of 4-20 amino acid residues. In certain embodiments, L₂ consists of 4-50 amino acid residues. In certain embodiments, L₂ consists of about 4-20 amino acid residues. In certain embodiments, L₁ and L₂ each independently consist of about 4-50 amino acid residues. In certain embodiments, L₁ and L₂ each independently consist of 4-20 amino acid residues.

[0200] In some embodiments, L₁ and L₂ have an optimized length and/or amino acid composition. In some embodiments, L₁ and L₂ are of the same length and have the same amino acid composition. In other embodiments, L₁ and L₂ are different.

[0201] In certain embodiments, L₁ is of equal number of amino acids to Lz; in certain embodiments L₁ is longer (i.e., more in the number of amino acids) than Lz; in certain embodiments L₁ is shorter (i.e., fewer number of amino acids) than Lz.

[0202] In certain embodiments, L₁ and/or L₂ are “short,” e.g., consist of 0, 1, 2, 3, 4, 5, 6, 7, 8, 9, 10, 11 or 12 amino acid residues. Thus, in certain instances, the spacer peptides consist of about 12 or fewer amino acid residues. In the case of 0 amino acid residues, the spacer peptide is a peptide bond. In certain embodiments, L₁ and/or L₂ are “long,” e.g., consist of 15, 20 or 25 amino acid residues. In some embodiments, the spacer peptides consist of about 3 to about 15, for example 8, 9 or 10 contiguous amino acid residues. Regarding the amino acid composition of L₁ and L₂, peptides are selected with properties that confer flexibility to first and the second polypeptides of the proteins of the present invention, do not interfere with the binding of the first and the second, different subunits to each other, as well as resist cleavage from proteases. For example, glycine and serine residues generally provide protease resistance. The spacer peptides suitable for linking the first subunit of the multisubunit protein to the amino acid sequence of SEQ ID NO:1, 2, 4, 6, 7, 9, 11, 237, 238, 239, or 240, and/or suitable for linking the second, different subunit of the multisubunit protein to the amino acid sequence of SEQ ID NO:1, 2, 4, 6, 7, 9, 11, 237, 238, 239, or 240 may include, as part of a linker, a (GS)ₙ, (GGS)ₙ, (GGGS)ₙ, (GGSG)ₙ, (GGSGG)ₙ, and (GGGGS)ₙ sequence, wherein n is 1, 2, 3, 4, 5, 6, 7, 8, 9, 10, 11, 12, 13, 14, 15, 16, 17, 18, 19, or 20. In some embodiments, L₁ and/or L₂ independently include a (GGGGS)₄ (SEQ ID NO:107) or (GGGGS)₃ (SEQ ID NO:108) sequence as part of a linker. In other embodiments, L₁ and/or L₂ independently include a peptide sequence, as part of a linker, as set forth in the sequences selected from: SEQ ID NO:111, SEQ ID NO:112, SEQ ID NO: 113, SEQ ID NO:114, SEQ ID NO:115, SEQ ID NO:116, SEQ ID NO:117, SEQ ID NO:118, SEQ ID NO:119, and SEQ ID NO:120, as listed in Table 7. In some embodiments, L₁ and/or L₂ are independently (GGGGS)ₙ₌₃ (SEQ ID NO:108), (GGGGS) n=2 (SEQ ID NO:109), or (GGGGS)ₙ₌₁ (SEQ ID NO:110).

TABLE 7

| SEQ ID | Amino Acid Sequence |
|---|---|
| SEQ ID | GSGSGSGSGSGSGSGSGSGS |
| NO: 111 | |
| SEQ ID | GGSGGSGGSGGSGGSGGSGG |
| NO: 112 | SGGSGGSGGS |
| SEQ ID | GGGSGGGSGGGSGGGSGGGS |
| NO: 113 | GGGSGGGSGGGSGGGSGG |
| | GS |
| SEQ ID | GGSGGGSGGGSGGGSGGGSG |
| NO: 114 | GGSGGGSGGGSGGGSGGG |
| | SG |
| SEQ ID | GGSGGGGSGGGGSGGGGSGG |
| NO: 115 | GGSGGGGSGGGGSGGGGS |
| | GGGGSGGGGSGG |
| SEQ ID | GGGGSGGGGSGGGGSGGGGS |
| NO: 116 | GGGGSGGGGSGGGGSGGG |
| | GSGGGGSGGGGS |
| SEQ ID | GGGGSGGGGSGGGGSGGGGS |
| NO: 117 | |
| SEQ ID | GGGGSGGGGSGGGGS |
| NO: 118 | |
| SEQ ID | GGGGSGGGGSGGGGSGGGGS |
| NO: 119 | GGGGSGGGGSGGGGSGGGGS |
| | GGGGSGGGGSGGGGSGGGGS |
| | GGGGSGGGGSGGGGSGGGGS |
| | GGGGSGGGGSGGGGSGGGGS |
| SEQ ID | GGSGGGGSGGGGSGGGGSGG |
| NO: 120 | GGSGGGGSGGGGSGGGGSGG |
| | GGSGGGGSGGGGSGGGGSGG |
| | GGSGGGGSGGGGSGGGGSGG |
| | GGSGGGGSGGGGSGGGGSGG |

[0203] In certain embodiments, L₁ includes a sequence, as part of a linker, a (GGGGS)ₙ₌₃ (SEQ ID NO:108) sequence, and L₂ includes, as part of a linker, a (GGGGS)ₙ₌₂ (SEQ ID NO:109), or (GGGGS)ₙ₌₁ (SEQ ID NO:110) sequence. In certain embodiments, L₂ includes a sequence, as part of a linker, a (GGGGS)ₙ₌₃ (SEQ ID NO:108) sequence, and L₁ includes, as part of a linker, a (GGGGS)ₙ₌₂ (SEQ ID NO:109), or (GGGGS)ₙ₌₁ (SEQ ID NO:110) sequence. In certain embodiments, L₁, as part of a linker, does not include a sequence as set forth in SEQ ID NO:107, SEQ ID NO:108, SEQ ID NO:109, SEQ ID NO:110, SEQ ID NO:111, SEQ ID NO:112, SEQ ID NO:113, SEQ ID NO:114, SEQ ID NO:115, SEQ ID NO:116, SEQ ID NO:117, SEQ ID NO:118, SEQ ID NO:119, or SEQ ID NO:120.

[0204] In certain embodiments, only L₂, as part of a linker, includes a sequence as set forth in SEQ ID NO:107, SEQ ID NO:108, SEQ ID NO:109, SEQ ID NO:110, SEQ ID NO:111, SEQ ID NO:112, SEQ ID NO:113, SEQ ID NO:114, SEQ ID NO:115, SEQ ID NO:116, SEQ ID NO:117, SEQ ID NO:118, SEQ ID NO:119, or SEQ ID NO:120. In certain embodiments, neither L₁ nor L₂, as part of a linker sequence, includes a sequence as set forth in SEQ ID NO:107, SEQ ID NO:108, SEQ ID NO:109, SEQ ID NO:110, SEQ ID NO:111, SEQ ID NO:112, SEQ ID NO:113, SEQ ID NO:114, SEQ ID NO:115, SEQ ID NO:116, SEQ ID NO:117, SEQ ID NO:118, SEQ ID NO:119, or SEQ ID NO:120.

[0205] Some heterodimeric Fc-fused proteins of the present invention comprise a first polypeptide comprising a first subunit of a multisubunit protein and a first antibody Fc domain polypeptide, in which a linker comprising GGGGSGGGGSGGGGS (SEQ ID NO:118; (G4S)₃) connects the first subunit of a multisubunit protein to the first antibody Fc domain polypeptide, for example an Fc domain polypeptide of an IgG4 antibody or an Fc domain polypeptide of an IgG1 antibody. Some heterodimeric Fc-fused proteins of the present invention comprise a second polypeptide comprising a second, different subunit of a multisubunit protein and a second antibody Fc domain polypeptide, in which a linker comprising GGGGSGGGGSGGGGS (SEQ ID NO:118; (G4S)₃) connects the second, different subunit of a multisubunit protein to the second antibody Fc domain polypeptide, for example an Fc domain polypeptide of an IgG4 antibody or an Fc domain polypeptide of an IgG1 antibody.

[0206] In certain embodiments, some heterodimeric Fc-fused proteins of the present invention comprise a first polypeptide comprising a first subunit of a multisubunit protein and a first antibody Fc domain polypeptide, in which a linker comprising GGGGSGGGGSGGGGS (SEQ ID NO:118; (G4S)₃) connects the first subunit of a multisubunit protein to the Fc domain polypeptide, and a second polypeptide comprising a second, different subunit of a multisubunit protein and a second antibody Fc domain polypeptide, in which the additional subunit is connected to the second antibody Fc domain polypeptide with a linker that does not comprise GGGGSGGGGSGGGGS (SEQ ID NO:118; (G4S)₃).

[0207] In certain embodiments, some heterodimeric Fc-fused proteins of the present invention comprise a first polypeptide comprising a first subunit of a multisubunit protein and a first antibody Fc domain polypeptide, in which a linker that does not comprise GGGGSGGGGSGGGGS (SEQ ID NO:118; (G4S)₃) connects the first subunit of a multisubunit protein to the Fc domain polypeptide, and a second polypeptide comprising a second, different subunit of a multisubunit protein and a second antibody Fc domain polypeptide, in which the second, different subunit of a multisubunit protein is connected to the second antibody Fc domain polypeptide with a linker comprising GGGGSGGGGSGGGGS (SEQ ID NO:118; (G4S)₃).

[0208] Some heterodimeric Fc-fused proteins of the present invention comprise a first polypeptide comprising a first subunit of a multisubunit protein and a first antibody Fc domain polypeptide, in which a linker comprising (GGGGS) n=2 (SEQ ID NO:109) connects the first subunit of a multisubunit protein to the first antibody Fc domain polypeptide, for example an Fc domain polypeptide of an IgG4 antibody or an Fc domain polypeptide of an IgG1 antibody. Some heterodimeric Fc-fused proteins of the present invention comprise a second polypeptide comprising a second, different subunit of a multisubunit protein and a second antibody Fc domain polypeptide, in which a linker comprising (GGGGS)ₙ₌₂ (SEQ ID NO:109) connects the second, different subunit of a multisubunit protein to the second antibody Fc domain polypeptide, for example an Fc domain polypeptide of an IgG4 antibody or an Fc domain polypeptide of an IgG1 antibody.

[0209] Some heterodimeric Fc-fused proteins of the present disclosure include a linker comprising (GGGGS) n=2 (SEQ ID NO:109), which connects a first subunit of a multisubunit protein to a first antibody Fc domain polypeptide, for example an Fc domain polypeptide of an IgG4 antibody or an Fc domain polypeptide of an IgG1 antibody, and connects a second, different subunit of a multisubunit protein to a second antibody Fc domain polypeptide, for example an Fc domain polypeptide of an IgG4 antibody or an Fc domain polypeptide of an IgG1 antibody.

[0210] In certain embodiments, some heterodimeric Fc-fused proteins of the present invention comprise a first polypeptide comprising a first subunit of a multisubunit protein and a first antibody Fc domain polypeptide, in which a linker comprising (GGGGS) n=2 (SEQ ID NO:109) connects the first subunit of a multisubunit protein to the Fc domain polypeptide, and a second polypeptide comprising a second, different subunit of a multisubunit protein and a second antibody Fc domain polypeptide, in which additional subunit of a multisubunit protein is connected to the second antibody Fc domain polypeptide with a linker that does not comprise (GGGGS)ₙ₌₂ (SEQ ID NO:109).

[0211] In certain embodiments, some heterodimeric Fc-fused proteins of the present invention comprise a first polypeptide comprising a first subunit of a multisubunit protein and a first antibody Fc domain polypeptide, in which a linker that does not comprise (GGGGS)ₙ₌₂ (SEQ ID NO:109) connects the first subunit of a multisubunit protein to the Fc domain polypeptide, and a second polypeptide comprising a second, different subunit of a multisubunit protein and a second antibody Fc domain polypeptide, in which the second, different subunit of a multisubunit protein is connected to the second antibody Fc domain polypeptide with a linker comprising (GGGGS)ₙ₌₂ (SEQ ID NO:109).

[0212] Some heterodimeric Fc-fused proteins of the present invention comprise a first polypeptide comprising a first subunit of a multisubunit protein and a first antibody Fc domain polypeptide, in which a linker comprising (GGGGS)ₙ₌₁ (SEQ ID NO:110) connects the first subunit of a multisubunit protein to the first antibody Fc domain polypeptide, for example an Fc domain polypeptide of an IgG4 antibody or an Fc domain polypeptide of an IgG1 antibody. Some heterodimeric Fc-fused proteins of the present invention comprise a second polypeptide comprising a second, different subunit of a multisubunit protein and a second antibody Fc domain polypeptide, in which a linker comprising (GGGGS)ₙ₌₁ (SEQ ID NO:110) connects the second, different subunit of a multisubunit protein to the second antibody Fc domain polypeptide, for example an Fc domain polypeptide of an IgG4 antibody or an Fc domain polypeptide of an IgG1 antibody.

[0213] Some heterodimeric Fc-fused proteins of the present disclosure include a linker comprising (GGGGS)ₙ₌₁ (SEQ ID NO:110), which connects a first subunit of a multisubunit protein to a first antibody Fc domain polypeptide, for example an Fc domain polypeptide of an IgG4 antibody or an Fc domain polypeptide of an IgG1 antibody, and connects a second, different subunit of a multisubunit protein to a second antibody Fc domain polypeptide, for example an Fc domain polypeptide of an IgG4 antibody or an Fc domain polypeptide of an IgG1 antibody.

[0214] In certain embodiments, some heterodimeric Fc-fused proteins of the present invention comprise a first polypeptide comprising a first subunit of a multisubunit protein and a first antibody Fc domain polypeptide, in which a linker comprising (GGGGS)ₙ₌₁ (SEQ ID NO:110) connects the first subunit of a multisubunit protein to the Fc domain polypeptide, and a second polypeptide comprising a second, different subunit of a multisubunit protein and a second antibody Fc domain polypeptide, in which the second, different subunit of a multisubunit protein is connected to the second antibody Fc domain polypeptide with a linker that does not comprise (GGGGS)ₙ₌₁ (SEQ ID NO:110).

[0215] In certain embodiments, some heterodimeric Fc-fused proteins of the present invention comprise a first polypeptide comprising a first subunit of a multisubunit protein and a first antibody Fc domain polypeptide, in which a linker that does not comprise (GGGGS)ₙ₌₁ (SEQ ID NO:110) connects the first subunit of a multisubunit protein to the Fc domain polypeptide, and a second polypeptide comprising a second, different subunit of a multisubunit protein and a second antibody Fc domain polypeptide, in which the second, different subunit of a multisubunit protein is connected to the second antibody Fc domain polypeptide with a linker comprising (GGGGS) n=1 (SEQ ID NO:110).

[0216] In certain embodiments, some heterodimeric Fc-fused proteins of the present invention comprise a first polypeptide comprising a first subunit of a multisubunit protein and a first antibody Fc domain polypeptide, in which a linker comprising (GGGGS)ₙ₌₁ (SEQ ID NO:110) sequence connects the first subunit of a multisubunit protein to the Fc domain polypeptide, and a second polypeptide comprising a second, different subunit of a multisubunit protein and a second antibody Fc domain polypeptide, in which the second, different subunit of a multisubunit protein is connected to the second antibody Fc domain polypeptide with a linker comprising (GGGGS)ₙ₌₂ (SEQ ID NO:109) sequence.

[0217] In certain embodiments, some heterodimeric Fc-fused proteins of the present invention comprise a first polypeptide comprising a first subunit of a multisubunit protein and a first antibody Fc domain polypeptide, in which a linker comprising (GGGGS)ₙ₌₂ (SEQ ID NO:109) sequence connects the first subunit of a multisubunit protein to the Fc domain polypeptide, and a second polypeptide comprising a second, different subunit of a multisubunit protein and a second antibody Fc domain polypeptide, in which the second, different subunit of a multisubunit protein is connected to the second antibody Fc domain polypeptide with a linker comprising (GGGGS) n=1 (SEQ ID NO:110) sequence.

### Fc Domain and Substitutions for Promoting Heterodimerization

[0218] The assembly of proteins of the present invention can be accomplished by expressing a first polypeptide comprising a first subunit of a multisubunit protein sequence fused to a first antibody Fc domain polypeptide (e.g., an IgG4 antibody Fc variant sequence or an IgG1 antibody Fc variant sequence, as disclosed in Table 2), and a second polypeptide comprising a second, different subunit of a multisubunit protein sequence fused to a second antibody Fc domain polypeptide (e.g., an IgG4 antibody Fc variant sequence or an IgG1 antibody Fc variant sequence, as disclosed in Table 2) in the same cell, which leads to the assembly of a heterodimeric Fc-fused protein according to the invention. The assembled proteins have heterodimeric Fc domain polypeptides with the first antibody Fc domain polypeptide and the second antibody Fc domain polypeptide bound to each other. Promoting the preferential assembly of heterodimers of the Fc can be accomplished by incorporating different mutations in the CH3 domain of each antibody heavy chain constant region as shown in U.S. Ser. Nos. 13/494,870, 16/028,850, 11/533,709, 12/875,015, 13/289,934, 14/773,418, 12/811,207, 13/866,756, 14/647,480, and 14/830,336. For example, mutations can be made in the CH3 domain based on human IgG1 and incorporating distinct pairs of amino acid substitutions within a first antibody Fc domain polypeptide and a second antibody Fc domain polypeptide that allow these two chains to selectively heterodimerize with each other. The positions of amino acid substitutions illustrated below are all numbered according to the EU index as in Kabat.

[0219] In one scenario, an amino acid substitution in the first antibody Fc domain polypeptide replaces the original amino acid with a larger amino acid, selected from arginine (R), phenylalanine (F), tyrosine (Y) or tryptophan (W), and at least one amino acid substitution in the second antibody Fc domain polypeptide replaces the original amino acid(s) with a smaller amino acid(s), chosen from alanine (A), serine (S), threonine (T), or valine (V), such that the larger amino acid substitution (a protuberance) fits into the surface of the smaller amino acid substitutions (a cavity). For example, one antibody Fc domain polypeptide can incorporate a T366W substitution, and the other can incorporate three substitutions including T366S, L368A, and Y407V.

[0220] A first polypeptide comprising a first subunit of a multisubunit protein sequence or a second polypeptide comprising a second, different subunit of a multisubunit protein sequence of the invention can optionally be coupled to an amino acid sequence at least 90% (e.g., at least 91%, 92%, 93%, 94%, 95%, 96%, 97%, 98%, or 99%) identical to an antibody constant region, such as an IgG constant region including hinge, CH2 and CH3 domains with or without a CH1 domain. In some embodiments, the amino acid sequence of the constant region is at least 90% (e.g., at least 91%, 92%, 93%, 94%, 95%, 96%, 97%, 98%, or 99%) identical to a human antibody constant region, such as a human IgG1 constant region, an IgG2 constant region, an IgG3 constant region, or an IgG4 constant region. In some other embodiments, the amino acid sequence of the constant region is at least 90% (e.g., at least 91%, 92%, 93%, 94%, 95%, 96%, 97%, 98%, or 99%) identical to an antibody constant region from another mammal, such as rabbit, dog, cat, mouse, or horse. One or more mutation(s) can be incorporated into the constant region as compared to the human IgG1 constant region, for example at Q347, Y349, L351, 5354, E356, E357, K360, Q362, 5364, T366, L368, K370, N390, K392, T394, D399, 5400, D401, F405, Y407, K409, T411 and/or K439. Exemplary substitutions include, for example, Q347E, Q347R, Y349S, Y349K, Y349T, Y349D, Y349E, Y349C, T350V, L351K, L351D, L351Y, S354C, E356K, E357Q, E357L, E357W, K360E, K360W, Q362E, S364K, S364E, S364H, S364D, T366V, T366I, T366L, T366M, T366K, T366W, T366S, L368E, L368A, L368D, K370S, N390D, N390E, K392L, K392M, K392V, K392F, K392D, K392E, T394F, T394W, D399R, D399K, D399V, S400K, S400R, D401K, F405A, F405T, Y407A, Y407I, Y407V, K409F, K409W, K409D, T411D, T411E, K439D, and K439E.

[0221] In certain embodiments, mutations that can be incorporated into the CH1 of a human IgG1 constant region may be at amino acids V125, F126, P127, T135, T139, A140, F170, P171, and/or V173. In certain embodiments, mutations that can be incorporated into the Cκ of a human IgG1 constant region may be at amino acids E123, F116, S176, V163, 5174, and/or T164.

[0222] Amino acid substitutions could be selected from the following sets of substitutions shown in Table 8.

TABLE 8

| | First Polypeptide | Second Polypeptide |
|---|---|---|
| Set 1 | S364E/F405A | Y349K/T394F |
| Set 2 | S364H/D401K | Y349T/T411E |
| Set 3 | S364H/T394F | Y349T/F405A |
| Set 4 | S364E/T394F | Y349K/F405A |
| Set 5 | S364E/T411E | Y349K/D401K |
| Set 6 | S364D/T394F | Y349K/F405A |
| Set 7 | S364H/F405A | Y349T/T394F |
| Set 8 | S364K/E357Q | L368D/K370S |
| Set 9 | L368D/K370S | S364K |
| Set 10 | L368E/K370S | S364K |
| Set 11 | K360E/Q362E | D401K |
| Set 12 | L368D/K370S | S364K/E357L |
| Set 13 | K370S | S364K/E357Q |
| Set 14 | F405L | K409R |
| Set 15 | K409R | F405L |

[0223] Alternatively, amino acid substitutions could be selected from the following sets of substitutions shown in Table 9.

TABLE 9

| | First Polypeptide | Second Polypeptide |
|---|---|---|
| Set 1 | K409W | D399V/F405T |
| Set 2 | Y349S | E357W |
| Set 3 | K360E | Q347R |
| Set 4 | K360E/K409W | Q347R/D399V/F405T |
| Set 5 | Q347E/K360E/K409W | Q347R/D399V/F405T |
| Set 6 | Y349S/K409W | E357W/D399V/F405T |

[0224] Alternatively, amino acid substitutions could be selected from the following set of substitutions shown in Table 10.

TABLE 10

| | First Polypeptide | Second Polypeptide |
|---|---|---|
| Set 1 | T366K/L351K | L351D/L368E |
| Set 2 | T366K/L351K | L351D/Y349E |
| Set 3 | T366K/L351K | L351D/Y349D |
| Set 4 | T366K/L351K | L351D/Y349E/L368E |
| Set 5 | T366K/L351K | L351D/Y349D/L368E |
| Set 6 | E356K/D399K | K392D/K409D |

[0225] Alternatively, at least one amino acid substitution in each polypeptide chain could be selected from Table 11.

TABLE 11

| First Polypeptide | Second Polypeptide |
|---|---|
| L351Y, D399R, D399K, | T366V, T366I, T366L, T366M, |
| S400K, S400R, Y407A, Y407I, | N390D, N390E, K392L, K392M, |
| Y407V | K392V, K392F K392D, K392E, |
| | K409F, K409W, T411D and |
| | T411E |

[0226] Alternatively, at least one amino acid substitutions could be selected from the following set of substitutions in Table 12, where the position(s) indicated in the First Polypeptide column is replaced by any known negatively-charged amino acid, and the position(s) indicated in the Second Polypeptide Column is replaced by any known positively-charged amino acid.

TABLE 12

| First Polypeptide | Second Polypeptide |
|---|---|
| K392, K370, K409, or K439 | D399, E356, or E357 |

[0227] Alternatively, at least one amino acid substitutions could be selected from the following set of in Table 13, where the position(s) indicated in the First Polypeptide column is replaced by any known positively-charged amino acid, and the position(s) indicated in the Second Polypeptide Column is replaced by any known negatively-charged amino acid.

TABLE 13

| First Polypeptide | Second Polypeptide |
|---|---|
| D399, E356, or E357 | K409, K439, K370, or K392 |

[0228] Alternatively, amino acid substitutions could be selected from the following set in Table 14.

TABLE 14

| First Polypeptide | Second Polypeptide |
|---|---|
| T350V, L351Y, F405A, and | T350V, T366L, K392L, and |
| Y407V | T394W |

[0229] Alternatively, or in addition, the structural stability of a heterodimeric Fc-fused protein according to the invention may be increased by introducing S354C on either of the first or second polypeptide chain, and Y349C on the opposing polypeptide chain, which forms an artificial disulfide bond within the interface of the two polypeptides.

[0230] In some embodiments, the amino acid sequence of one polypeptide chain of the antibody constant region differs from the amino acid sequence of an IgG1 constant region at position T366, and the amino acid sequence of the other polypeptide chain of the antibody constant region differs from the amino acid sequence of an IgG1 constant region at one or more position(s) selected from T366, L368 and Y407.

[0231] In some embodiments, the amino acid sequence of one polypeptide chain of the antibody constant region differs from the amino acid sequence of an IgG1 constant region at one or more position(s) selected from T366, L368 and Y407, and the amino acid sequence of the other polypeptide chain of the antibody constant region differs from the amino acid sequence of an IgG1 constant region at position T366.

[0232] In some embodiments, the amino acid sequence of one polypeptide chain of the antibody constant region differs from the amino acid sequence of an IgG1 constant region at one or more position(s) selected from E357, K360, Q362, 5364, L368, K370, T394, D401, F405, and T411 and the amino acid sequence of the other polypeptide chain of the antibody constant region differs from the amino acid sequence of an IgG1 constant region at one or more position(s) selected from Y349, E357, S364, L368, K370, T394, D401, F405 and T411.

[0233] In some embodiments, the amino acid sequence of one polypeptide chain of the antibody constant region differs from the amino acid sequence of an IgG1 constant region at one or more position(s) selected from Y349, E357, S364, L368, K370, T394, D401, F405 and T411 and the amino acid sequence of the other polypeptide chain of the antibody constant region differs from the amino acid sequence of an IgG1 constant region at one or more position(s) selected from E357, K360, Q362, S364, L368, K370, T394, D401, F405, and T411.

[0234] In some embodiments, the amino acid sequence of one polypeptide chain of the antibody constant region differs from the amino acid sequence of an IgG1 constant region at one or more position(s) selected from L351, D399, 5400 and Y407 and the amino acid sequence of the other polypeptide chain of the antibody constant region differs from the amino acid sequence of an IgG1 constant region at one or more position(s) selected from T366, N390, K392, K409 and T411.

[0235] In some embodiments, the amino acid sequence of one polypeptide chain of the antibody constant region differs from the amino acid sequence of an IgG1 constant region at one or more position(s) selected from T366, N390, K392, K409 and T411 and the amino acid sequence of the other polypeptide chain of the antibody constant region differs from the amino acid sequence of an IgG1 constant region at one or more position(s) selected from L351, D399, 5400 and Y407.

[0236] In some embodiments, the amino acid sequence of one polypeptide chain of the antibody constant region differs from the amino acid sequence of an IgG1 constant region at one or more position(s) selected from Q347, Y349, K360, and K409, and the amino acid sequence of the other polypeptide chain of the antibody constant region differs from the amino acid sequence of an IgG1 constant region at one or more position(s) selected from Q347, E357, D399 and F405.

[0237] In some embodiments, the amino acid sequence of one polypeptide chain of the antibody constant region differs from the amino acid sequence of an IgG1 constant region at one or more position(s) selected from Q347, E357, D399 and F405, and the amino acid sequence of the other polypeptide chain of the antibody constant region differs from the amino acid sequence of an IgG1 constant region at one or more position(s) selected from Y349, K360, Q347 and K409.

[0238] In some embodiments, the amino acid sequence of one polypeptide chain of the antibody constant region differs from the amino acid sequence of an IgG1 constant region at one or more position(s) selected from K370, K392, K409 and K439, and the amino acid sequence of the other polypeptide chain of the antibody constant region differs from the amino acid sequence of an IgG1 constant region at one or more position(s) selected from D356, E357 and D399.

[0239] In some embodiments, the amino acid sequence of one polypeptide chain of the antibody constant region differs from the amino acid sequence of an IgG1 constant region at one or more position(s) selected from D356, E357 and D399, and the amino acid sequence of the other polypeptide chain of the antibody constant region differs from the amino acid sequence of an IgG1 constant region at one or more position(s) selected from K370, K392, K409 and K439.

[0240] In some embodiments, the amino acid sequence of one polypeptide chain of the antibody constant region differs from the amino acid sequence of an IgG1 constant region at one or more position(s) selected from L351, E356, T366 and D399, and the amino acid sequence of the other polypeptide chain of the antibody constant region differs from the amino acid sequence of an IgG1 constant region at one or more position(s) selected from Y349, L351, L368, K392 and K409.

[0241] In some embodiments, the amino acid sequence of one polypeptide chain of the antibody constant region differs from the amino acid sequence of an IgG1 constant region at one or more position(s) selected from Y349, L351, L368, K392 and K409, and the amino acid sequence of the other polypeptide chain of the antibody constant region differs from the amino acid sequence of an IgG1 constant region at one or more position(s) selected from L351, E356, T366 and D399.

[0242] In some embodiments, the amino acid sequence of one polypeptide chain of the antibody constant region differs from the amino acid sequence of an IgG1 constant region by an S354C substitution and the amino acid sequence of the other polypeptide chain of the antibody constant region differs from the amino acid sequence of an IgG1 constant region by a Y349C substitution.

[0243] In some embodiments, the amino acid sequence of one polypeptide chain of the antibody constant region differs from the amino acid sequence of an IgG1 constant region by a Y349C substitution and the amino acid sequence of the other polypeptide chain of the antibody constant region differs from the amino acid sequence of an IgG1 constant region by an S354C substitution.

[0244] In some embodiments, the amino acid sequence of one polypeptide chain of the antibody constant region differs from the amino acid sequence of an IgG1 constant region by K360E and K409W substitutions and the amino acid sequence of the other polypeptide chain of the antibody constant region differs from the amino acid sequence of an IgG1 constant region by O347R, D399V and F405T substitutions.

[0245] In some embodiments, the amino acid sequence of one polypeptide chain of the antibody constant region differs from the amino acid sequence of an IgG1 constant region by O347R, D399V and F405T substitutions and the amino acid sequence of the other polypeptide chain of the antibody constant region differs from the amino acid sequence of an IgG1 constant region by K360E and K409W substitutions.

[0246] In some embodiments, the amino acid sequence of one polypeptide chain of the antibody constant region differs from the amino acid sequence of an IgG1 constant region by a T366W substitutions and the amino acid sequence of the other polypeptide chain of the antibody constant region differs from the amino acid sequence of an IgG1 constant region by T366S, T368A, and Y407V substitutions.

[0247] In some embodiments, the amino acid sequence of one polypeptide chain of the antibody constant region differs from the amino acid sequence of an IgG1 constant region by T366S, T368A, and Y407V substitutions and the amino acid sequence of the other polypeptide chain of the antibody constant region differs from the amino acid sequence of an IgG1 constant region by a T366W substitution.

[0248] In some embodiments, the amino acid sequence of one polypeptide chain of the antibody constant region differs from the amino acid sequence of an IgG1 constant region by T350V, L351Y, F405A, and Y407V substitutions and the amino acid sequence of the other polypeptide chain of the antibody constant region differs from the amino acid sequence of an IgG1 constant region by T350V, T366L, K392L, and T394W substitutions.

[0249] In some embodiments, the amino acid sequence of one polypeptide chain of the antibody constant region differs from the amino acid sequence of an IgG1 constant region by T350V, T366L, K392L, and T394W substitutions and the amino acid sequence of the other polypeptide chain of the antibody constant region differs from the amino acid sequence of an IgG1 constant region by T350V, L351Y, F405A, and Y407V substitutions.

[0250] A skilled person in the art would appreciate that during production and/or storage of proteins, N-terminal glutamate (E) or glutamine (Q) can be cyclized to form a lactam (e.g., spontaneously or catalyzed by an enzyme present during production and/or storage). Accordingly, in some embodiments where the N-terminal residue of an amino acid sequence of a polypeptide is E or Q, a corresponding amino acid sequence with the E or Q replaced with pyroglutamate is also contemplated herein.

[0251] A skilled person in the art would also appreciate that during protein production and/or storage, the C-terminal lysine (K) of a protein can be removed (e.g., spontaneously or catalyzed by an enzyme present during production and/or storage). Such removal of K is often observed with proteins that comprise a Fc domain at its C-terminus. Accordingly, in some embodiments where the C-terminal residue of an amino acid sequence of a polypeptide (e.g., a Fc domain sequence) is K, a corresponding amino acid sequence with the K removed is also contemplated herein.

### Mutations for Reducing Effector Functions

[0252] In one aspect, the present invention provides a heterodimeric Fc-fused protein comprising (a) a first polypeptide comprising a first antibody Fc domain polypeptide and a first subunit of a multisubunit protein; and (b) a second polypeptide comprising a second antibody Fc domain polypeptide and a second, different subunit of the multisubunit protein, wherein the first and second antibody Fc domain polypeptides each comprise different mutations promoting heterodimerization, wherein the first and/or second antibody Fc domain polypeptides comprise one or more mutation(s) that reduce(s) an effector function of an Fc, and wherein the first subunit and second, different subunit of the multisubunit protein are bound to each other. In certain embodiments, a heterodimeric Fc-fused protein disclosed herein comprising one or more mutation(s) that reduce(s) an effector function of an Fc has an increased activity to inhibit tumor growth than its counterpart without the Fc mutation(s) that reduce(s) the effector function. The mutations contemplated herein include substitution, insertion, and deletion of amino acid residues. All the amino acid positions in an Fc domain or hinge region disclosed herein are numbered according to EU numbering.

[0253] In certain embodiments, the first and/or second antibody Fc domain polypeptides comprise one or more mutation(s) that reduce(s) the ability of the Fc domain polypeptide to induce antibody-dependent cellular cytotoxicity (ADCC) and/or antibody-dependent cellular phagocytosis (ADCP). ADCC and ADCP are typically mediated by an Fc receptor. For example, in certain embodiments, the first and second antibody Fc domain polypeptides are human IgG (e.g., human IgG1, human IgG2, human IgG3, or human IgG4) antibody sequences. The Fc receptors of human IgG, also called Fc gamma receptors (FcγRs), include but are not limited to activating Fc gamma receptors FcγRI (CD64), FcγRIIA (CD32A), FcγRIIIA (CD16 or CD16A), and FcγRIIIB (CD16B), and inhibitor Fc gamma receptor FcγRIIB (CD32B). Accordingly, in some embodiments, a heterodimeric Fc-fused protein of the present invention includes one or more mutation(s) to reduce binding to an activating FcγR (e.g., FcγRI, FcγRIIA, FcγRIIIA, or FcγRIIIB) in the first and/or second polypeptides. In some embodiments, a heterodimeric Fc-fused protein of the present invention includes one or more mutation(s) to increase binding to an inhibitory FcγR (e.g., FcγRIIB) in the first and/or second polypeptides.

[0254] Fc mutations that reduce binding to an activating FcγR and/or increase binding to an inhibitory FcγR are known in the art. For example, within the hinge and Fc regions, CD16 binding is mediated by the hinge region and the CH2 domain. For example, within human IgG1, the interaction with CD16 is primarily focused on amino acid residues Asp 265-Glu 269, Asn 297-Thr 299, Ala 327-Ile 332, Leu 234-Ser 239, and carbohydrate residue N-acetyl-D-glucosamine in the CH2 domain (see, Sondermann et al, Nature, 406 (6793):267-273). Based on the known domains, mutations can be selected to enhance or reduce the binding affinity to CD16, such as by using phage-displayed libraries or yeast surface-displayed cDNA libraries, or can be designed based on the known three-dimensional structure of the interaction.

[0255] As reviewed in Want et al., Protein Cell (2018) 9(1):63-73, the regions including amino acid positions 232-239, 265-270, 296-299, and 325-332 are implicated in activating FcγR binding according to a crystal structure of human IgG1 Fc. Wang et al. also discloses that L235E and F234A/L235A mutations of human IgG4, L234A/L235A mutations of human IgG1, and N297 mutations (e.g., N297A, N297Q, N297G, or N297D) of IgG antibodies reduce activating FcγR binding. As disclosed in U.S. Pat. No. 8,969,526, mutation at position 329 (e.g., P329A, P329G, or P329R) also reduces activating FcγR binding. Additional amino acid positions and mutations (e.g., E233P mutation) implicated in activating FcγR binding are disclosed in U.S. Pat. No. 7,943,743 and Isaacs et al., J. Immunol. (1998) 161:3862-69.

[0256] Accordingly, in certain embodiments, the first and second antibody Fc domain polypeptides comprise a mutation (e.g., substitution relative to wild-type human IgG1) at one or more of positions selected from 233, 234, 235, 297, and 329. In certain embodiments, the first and second antibody Fc domain polypeptides are human IgG1 antibody Fc domain polypeptides comprising mutation(s) E233P; L234A (human IgG1) or F234A (human IgG4); L235A or L235E; N297A, N297Q, N297G, or N297D; and/or P329A, P329G, or P329R. In certain embodiments, the first and second antibody Fc domain polypeptides are human IgG1 antibody Fc domain polypeptides comprising mutations L234A and L235A. In certain embodiments, the first and second antibody Fc domain polypeptides are human IgG1 antibody Fc domain polypeptides comprising mutations L234A, L235A, and P329A. In certain embodiments, the first and second antibody Fc domain polypeptides are human IgG4 antibody Fc domain polypeptides comprising mutation L235E. In certain embodiments, the first and second antibody Fc domain polypeptides are human IgG1 antibody Fc domain polypeptides comprising mutations L235E and P329A.

[0257] In certain embodiments, the first and/or second antibody Fc domain polypeptides comprise one or more mutation(s) that reduce(s) the ability of the Fc domain polypeptide to induce complement dependent cytotoxicity (CDC). CDC is typically mediated by a complement component (e.g., C1q). Accordingly, in certain embodiments, a heterodimeric Fc-fused protein of the present invention includes one or more mutation(s) to reduce binding to a complement component (e.g., C1q) in the first and/or second polypeptides.

[0258] Fc mutations that reduce binding to C1q are known in the art. For example, as disclosed in U.S. Pat. Nos. 5,648,260 and 5,624,821, the amino acid residues of Fc at positions 234, 235, 236, 237, 297, 318, 320, and 322 are implicated in C1q binding. As disclosed in Tao et al., J. Exp. Med. (1993) 178:661-667 and Brekke et al., Eur. J. Immunol. (1994) 24:2542-47, residue Pro at position 331 is implicated in C1q binding. As disclosed in Idusogie et al., J. Immunol. (2000) 164:4178-84, mutations of Fc at positions 270 (e.g., D270A), 322 (K322A), 329 (e.g., P329A), and 331 (e.g., P331A, P331S, or P331G) reduced C1q binding.

[0259] Accordingly, in certain embodiments, the first and second antibody Fc domain polypeptides comprise a mutation (e.g., substitution relative to wild-type human IgG1) at one or more of positions selected from 234, 235, 236, 237, 270, 297, 318, 320, 322, 329, and 331. In certain embodiments, the first and second antibody Fc domain polypeptides are human IgG1 antibody Fc domain polypeptides comprising mutation(s) G237A, A330S, P331S, and/or P329A. In certain embodiments, the first and second antibody Fc domain polypeptides are human IgG1 antibody Fc domain polypeptides comprising mutations G237A, A330S, and P331S. In certain embodiments, the first and second antibody Fc domain polypeptides are human IgG1 antibody Fc domain polypeptides comprising mutation P329A.

[0260] The mutations that reduce ADCC and/or ADCP and the mutations that reduce CDC can be combined. In certain embodiments, the first and/or second antibody Fc domain polypeptides comprise one or more mutation(s) that reduce(s) the ability of the Fc domain polypeptide to induce ADCC and/or ADCP and further comprise one or more mutation(s) that reduce(s) the ability of the Fc domain polypeptide to induce CDC. In certain embodiments, the first and second antibody Fc domain polypeptides each comprise one or more mutation(s) that reduce(s) the ability of the Fc domain polypeptide to induce ADCC and/or ADCP and further comprise one or more mutation(s) that reduce(s) the ability of the Fc domain polypeptide to induce CDC.

[0261] In some embodiments, a heterodimeric Fc-fused protein of the present invention with an IgG4 Fc includes one or more mutation(s) to reduce binding to an FcγR (e.g., FcγRI, FcγRIIA, FcγRIIB, FcγRIIIA, or FcγRIIIB) or a complement component (e.g., C1q) in the first and/or second polypeptides. Such mutations are useful for reducing effector functions. For example, a protein of the present disclosure can include SPLE (S228P and L235E) mutations, SPLEPA (S228P, L235E, and P329A) mutations, or SPLEPG (S228P, L235E, and P329G) mutations.

[0262] In some embodiments, a heterodimeric Fc-fused protein of the present invention with an IgG1 Fc includes one or more mutation(s) to reduce binding to an FcγR (e.g., FcγRI, FcγRIIA, FcγRIIB, FcγRIIIA, or FcγRIIIB) or a complement component (e.g., C1q) in the first and/or second polypeptides. Such mutations are useful for reducing effector functions. For example, a protein of the present disclosure can include LALA (L234A and L235A) mutations, LALAPA (L234A, L235A, and P329A) mutations, LALAPG (L234A, L235A, and P329G) mutations, or LALEGAASPS (L234A, L235E, G237A, A330S, and P331S) mutations.

[0263] In some embodiments, a heterodimeric Fc-fused protein according to the invention includes a first antibody IgG4 or IgG1 Fc domain polypeptide and a second antibody IgG4 or IgG1 Fc domain polypeptide each containing the mutation P329G or P329A.

[0264] In some embodiments, the first antibody Fc domain polypeptide and the second antibody Fc domain polypeptide each contain a mutation selected from A330S and P331S.

[0265] In some embodiments, the first antibody Fc domain polypeptide and the second antibody Fc domain polypeptide each contain the mutations A330S and P331S.

[0266] In certain embodiments, in the first polypeptide of the heterodimeric Fc-fused protein of the present invention, the first subunit of the multisubunit protein is fused to the first antibody Fc domain polypeptide by a first linker. In certain embodiments, in the second polypeptide of the heterodimeric Fc-fused protein of the present invention, the second, different subunit of the multisubunit protein is fused to the second antibody Fc domain polypeptide by a second linker. Amino acid sequences of linkers suitable for such use are described under the headings “IgG4 constructs” and “IgG1 constructs.” Additional linker sequences suitable for use in the first and/or second polypeptides include but are not limited to wild-type IgG (e.g., human IgG1, human IgG2, human IgG3, or human IgG4) hinge sequences and mutant forms thereof. For example, in certain embodiments, the first and second linkers each comprise amino acid sequence ESKYGPPCPPCPAPEFXGG, wherein X is L or E (SEQ ID NO:280) or SKYGPPCPPCPAPEFXGG, wherein X is L or E (SEQ ID NO:281). In certain embodiments, the first and second linkers each comprise amino acid sequence ESKYGPPCPPCPAPEFLGG (SEQ ID NO:282) or SKYGPPCPPCPAPEFLGG (SEQ ID NO:283). In certain embodiments, the first and second linkers each comprise amino acid sequence ESKYGPPCPPCPAPEFEGG (SEQ ID NO:284) or SKYGPPCPPCPAPEFEGG (SEQ ID NO:285).

### Serum Half-Life

[0267] Heterodimeric Fc-fused proteins according to the invention have pharmacokinetic properties suitable for therapeutic use. For example, in certain embodiments, a heterodimeric Fc-fused protein according to the invention has a serum half-life of at least about 50 hours. In certain embodiments, a heterodimeric Fc-fused protein according to the invention has a serum half-life of at least about 100 hours.

[0268] In certain embodiments, 50 hours after intravenous administration to a subject, the serum concentration of the heterodimeric Fc-fused protein according to the invention is at least 10% of the serum concentration of the protein of the present invention 1 hour after the administration in said subject.

[0269] In certain embodiments, a heterodimeric Fc-fused protein according to the invention has a serum half-life that is at least 20%, 30%, 40%, 50%, 60%, 70%, 80%, or 90% longer than the multisubunit protein not fused to Fc domain polypeptides. In certain embodiments, a heterodimeric Fc-fused protein comprising a protein sequence of a multisubunit protein according to the present invention has a serum half-life that is at least 2-fold, 3-fold, 4-fold, 5-fold, 6-fold, 7-fold, 8-fold, 9-fold, 10-fold, 15-fold, or 20-fold longer than the multisubunit protein not fused to Fc domain polypeptides.

### Tumor Retention

[0270] Heterodimeric Fc-fused proteins of the invention can optionally incorporate additional features to enhance retention of the proteins at the tumor site. For example, in certain embodiments of the present invention, the heterodimeric Fc-fused protein further comprises a proteoglycan-binding domain, a collagen-binding domain, and/or a hyaluronic acid-binding domain. In certain embodiments, the heterodimeric Fc-fused protein further comprises a proteoglycan-binding domain that binds one or more proteoglycans (e.g., proteoglycans known in the art, e.g., as disclosed in Lozzo et al., Matrix Bio (2015) 42:11-55; and Nikitovic et al., Frontiers in Endocrinology (2018) 9:69) that are present in a tumor (e.g., on the surface of a tumor cell, in a pericellular matrix in a tumor, or in a extracellular matrix in a tumor). In certain embodiments, the collagen-binding domain binds one or more collagens that are present in a tumor (e.g., on the surface of a tumor cell, in a pericellular matrix in a tumor, or in a extracellular matrix in a tumor). In certain embodiments, the heterodimeric Fc-fused protein further comprises a h acid-binding domain that binds to one ore more hyaluronic acid that are present in a tumor. Such heterodimeric Fc-fused proteins have enhanced retention in tumors and may be administered to a subject intratumorally at a lower dose and/or frequency.

[0271] In certain embodiments, the proteoglycan-binding domain comprised in the heterodimeric Fc-fused protein binds one or more proteoglycans that are specifically expressed in a tumor (e.g., on the surface of a tumor cell, in a pericellular matrix in a tumor, or in a extracellular matrix in a tumor). In certain embodiments, the collagen-binding domain comprised in the heterodimeric Fc-fused protein binds one or more collagens that are specifically expressed in a tumor (e.g., on the surface of a tumor cell, in a pericellular matrix in a tumor, or in a extracellular matrix in a tumor). Such heterodimeric Fc-fused proteins may be enriched in tumors after administration (e.g., intravenous, subcutaneous, or pulmonary administration) and have enhanced tumor retention, thereby allowing administration at a lower dose and/or frequency.

[0272] In certain embodiments, the heterodimeric Fc-fused protein of the present invention further comprises a proteoglycan-binding domain that binds one or more proteoglycans selected from syndecan, chondroitin sulfate proteoglycan 4 (CSPG4), betaglycan, phosphacan, glypican, perlecan, agrin, collagen (e.g., collagen IX, XII, XV, or XVIII), hyalectan, aggrecan, versican, neurocan, brevican, and a small leucine-rich proteoglycan (SLRP). Proteoglycans implicated in cancer include but are not limited to collagen, syndecan (e.g., syndecan-1 or syndecan-2), serglycin, CSPG4, betaglycan, glypican (e.g., glypican-1 or glypican-3), perlecan, versican, brevican, and SLPR (e.g., decorin, biglycan, asporin, fibrodulin, and lumican). Accordingly, in certain embodiments, the proteoglycan-binding domain comprised in the heterodimeric Fc-fused protein binds one or more proteoglycans selected from syndecan (e.g., syndecan-1 or syndecan-2), serglycin, CSPG4, betaglycan, glypican (e.g., glypican-1 or glypican-3), perlecan, versican, brevican, and a SLPR. In certain embodiments, the proteoglycan-binding domain comprised in the heterodimeric Fc-fused protein binds one or more SLPRs selected from decorin, biglycan, asporin, fibrodulin, and lumican.

[0273] The proteoglycan-binding domain comprised in the heterodimeric Fc-fused protein can be a protein (e.g., an antibody or an antigen-binding fragment thereof), a peptide (e.g., a portion of a proteoglycan-binding protein or a variant thereof), an aptamer, a small molecule, or a combination thereof. Proteoglycan-binding domains are also known in the art. For example, syndecan-binding domains are disclosed in U.S. Pat. Nos. 6,566,489, 8,647,828, and 10,124,038; U.S. Patent Application Publication No. 2009/0297479; and PCT Patent Application Publication No. WO2018199176A1. CSPG4-binding domains are disclosed in U.S. Pat. Nos. 9,801,928 and 10,093,745; and U.S. Patent Application Publication Nos. 2016/0032007, 2017/0342151, and 2018/0072811. β-glycan-binding domains are disclosed in U.S. Pat. No. 7,455,839. Glypican-binding domains are disclosed in U.S. Pat. Nos. 7,919,086, 7,776,329, 8,680,247, 8,388,937, 9,260,492, 9,394,364, 9,790,267, 9,522,940, and 9,409,994; U.S. Patent Application Publication Nos. 2004/0236080, 2011/0123998, 2018/0244805, 2018/0230230, and 2018/0346592; European Patent No. 2270509; and PCT Patent Application Publication No. WO2017053619A1, WO2018026533A1, WO2018165344A1, and WO2018199318A1. Perlecan-binding domains are disclosed in U.S. Pat. No. 10,166,304. Decorin-binding domains are disclosed in U.S. Pat. No. 6,517,838 and PCT Patent Application Publication No. WO2000021989A1, WO2000077041A2, and WO2000078800A2.

[0274] In certain embodiments, the heterodimeric Fc-fused protein of the present invention further comprises a collagen-binding domain. Collagen is a class of proteins having at least 28 different types identified in vertebrates. Each type of collagen has its unique structural characteristics and distribution pattern, as disclosed in Fang et al., Tumor Biol. (2014) 35:2871-82 and Xiong et al., J. Cancer Metasta. Treat. (2016) 2:357-64. Various types of collagens are implicated in cancer, including but not limited to Col3A1, Col5A2, Col6, Col7A1, Col15A1 Col19A1, and Col22A1. The collagen-binding domain can be a protein (e.g., an antibody or an antigen-binding fragment thereof), a peptide (e.g., a portion of a collagen-binding protein or a variant thereof), an aptamer, a small molecule, or a combination thereof. Collagen-binding domains are known in the art, and are disclosed in, for example, U.S. Pat. Nos. 5,788,966, 5,587,360, 5,851,794, 5,741,670, 5,849,701, 6,288,214, 6,387,663, 6,908,994, 7,169,902, 7,488,792, 7,820,401, 8,956,612, 8,642,728, and 8,906,649, and U.S. Patent Application Publication Nos. 2007/0161062, 2009/0142345, and 2012/0100106.

[0275] In certain embodiments, the heterodimeric Fc-fused protein of the present invention further comprises a hyaluronic acid-binding domain. The hyaluronic acid-binding domain can be a protein (e.g., an antibody or an antigen-binding fragment thereof), a peptide (e.g., a portion of a hyaluronic acid-binding protein or a variant thereof), an aptamer, a small molecule, or a combination thereof. Hyaluronic acid-binding domains are known in the art, and are disclosed in, for example, U.S. Pat. Nos. 6,864,235, 8,192,744, 8,044,022, 8,163,498, 8,034,630, 9,217,016, 9,795,686, and 9,751,919, and U.S. Patent Application Publication Nos. 2002/0055488 and 2007/0259380.

[0276] A proteoglycan-binding domain, collagen-binding domain, and/or hyaluronic acid-binding domain, if present, can be at any position of the heterodimeric Fc-fused protein. For example, in certain embodiments, where the IL-12 subunits are positioned N-terminal to the antibody Fc domain polypeptides, a proteoglycan-binding domain, a collagen-binding domain, and/or a hyaluronic acid-binding domain as disclosed herein can be fused to the C-terminus of the first antibody Fc domain polypeptide and/or to the C-terminus of the second antibody Fc domain polypeptide. In certain embodiments, where the IL-12 subunits are positioned C-terminal to the antibody Fc domain polypeptides, a proteoglycan-binding domain, a collagen-binding domain, and/or a hyaluronic acid-binding domain as disclosed herein can be fused to the N-terminus of the first antibody Fc domain polypeptide and/or to the N-terminus of the second antibody Fc domain polypeptide.

[0277] A proteoglycan-binding domain, collagen-binding domain, and/or hyaluronic acid-binding domain, if present, can be fused to the rest of the heterodimeric Fc-fused protein through a linker. In certain embodiments, the proteoglycan-binding domain is fused to the rest of the heterodimeric Fc-fused protein through a peptide linker. In certain embodiments, the peptide linker includes a spacer peptide disclosed herein.

### II. Methods of Preparation

[0278] The proteins of the present invention can be made using recombinant DNA technology well known to a skilled person in the art. For example, a first nucleic acid sequence encoding a first polypeptide comprising a first subunit of a multisubunit protein sequence fused to a first antibody Fc domain polypeptide can be cloned into a first expression vector; a second nucleic acid sequence encoding a second polypeptide comprising a second, different subunit of a multisubunit fused to a second antibody Fc domain polypeptide can be cloned into a second expression vector; and the first and the second expression vectors can be stably transfected together into host cells to produce the multimeric proteins.

[0279] To achieve the highest yield of the protein, different ratios of the first and second expression vectors can be explored to determine the optimal ratio for transfection into the host cells. After transfection, single clones can be isolated for cell bank generation using methods known in the art, such as limited dilution, ELISA, FACS, microscopy, or Clonepix.

[0280] Clones can be cultured under conditions suitable for bio-reactor scale-up and maintained expression of the proteins of the present invention. The proteins can be isolated and purified using methods known in the art including centrifugation, depth filtration, cell lysis, homogenization, freeze-thawing, affinity purification, gel filtration, ion exchange chromatography, hydrophobic interaction exchange chromatography, and mixed-mode chromatography.

### III. Pharmaceutical Compositions

[0281] The present disclosure also features pharmaceutical compositions that contain an effective amount of a protein described herein. The composition can be formulated for use in a variety of drug delivery systems. One or more physiologically acceptable excipient(s) or carrier(s) can also be included in the composition for proper formulation. Suitable formulations for use in the present disclosure are found in Remington's Pharmaceutical Sciences, Mack Publishing Company, Philadelphia, Pa., 17th ed., 1985. For a brief review of methods for drug delivery, see, e.g., Langer (Science 249:1527-1533, 1990).

[0282] The intravenous drug delivery formulation of the present disclosure may be contained in a bag, a pen, or a syringe. In certain embodiments, the bag may be connected to a channel comprising a tube and/or a needle. In certain embodiments, the formulation may be a lyophilized formulation or a liquid formulation. In certain embodiments, the formulation may freeze-dried (lyophilized) and contained in about 12-60 vials. In certain embodiments, the formulation may be freeze-dried and 45 mg of the freeze-dried formulation may be contained in one vial. In certain embodiments, the about 40 mg-about 100 mg of freeze-dried formulation may be contained in one vial. In certain embodiments, freeze dried formulation from 12, 27, or 45 vials are combined to obtained a therapeutic dose of the protein in the intravenous drug formulation. In certain embodiments, the formulation may be a liquid formulation and stored as about 250 mg/vial to about 1000 mg/vial. In certain embodiments, the formulation may be a liquid formulation and stored as about 600 mg/vial. In certain embodiments, the formulation may be a liquid formulation and stored as about 250 mg/vial.

[0283] A heterodimeric Fc-fused protein of the present invention could exist in a liquid aqueous pharmaceutical formulation including an effective amount of the protein in a buffered solution forming a formulation.

[0284] These compositions may be sterilized by conventional sterilization techniques, or may be sterile filtered. The resulting aqueous solutions may be packaged for use as-is, or lyophilized, the lyophilized preparation being combined with a sterile aqueous carrier prior to administration. The pH of the preparations typically will be between 3 and 11, more preferably between 5 and 9 or between 6 and 8, and most preferably between 7 and 8, such as 7 to 7.5. The resulting compositions in solid form may be packaged in multiple single dose units, each containing a fixed amount of the above-mentioned agent or agents. The composition in solid form can also be packaged in a container for a flexible quantity.

[0285] In certain embodiments, the present disclosure provides a formulation with an extended shelf life including the heterodimeric Fc-fused protein of the present disclosure, in combination with mannitol, citric acid monohydrate, sodium citrate, disodium phosphate dihydrate, sodium dihydrogen phosphate dihydrate, sodium chloride, polysorbate 80, water, and sodium hydroxide.

[0286] In certain embodiments, an aqueous formulation is prepared including the heterodimeric Fc-fused protein of the present disclosure in a pH-buffered solution. The buffer of this invention may have a pH ranging from about 4 to about 8, e.g., from about 4.5 to about 6.0, or from about 4.8 to about 5.5, or may have a pH of about 5.0 to about 5.2. Ranges intermediate to the above recited pH's are also intended to be part of this disclosure. For example, ranges of values using a combination of any of the above recited values as upper and/or lower limits are intended to be included. Examples of buffers that will control the pH within this range include acetate (e.g., sodium acetate), succinate (such as sodium succinate), gluconate, histidine, citrate and other organic acid buffers.

[0287] In certain embodiments, the formulation includes a buffer system which contains citrate and phosphate to maintain the pH in a range of about 4 to about 8. In certain embodiments the pH range may be from about 4.5 to about 6.0, or from about pH 4.8 to about 5.5, or in a pH range of about 5.0 to about 5.2. In certain embodiments, the buffer system includes citric acid monohydrate, sodium citrate, disodium phosphate dihydrate, and/or sodium dihydrogen phosphate dihydrate. In certain embodiments, the buffer system includes about 1.3 mg/mL of citric acid (e.g., 1.305 mg/mL), about 0.3 mg/mL of sodium citrate (e.g., 0.305 mg/mL), about 1.5 mg/mL of disodium phosphate dihydrate (e.g., 1.53 mg/mL), about 0.9 mg/mL of sodium dihydrogen phosphate dihydrate (e.g., 0.86), and about 6.2 mg/mL of sodium chloride (e.g., 6.165 mg/mL). In certain embodiments, the buffer system includes 1-1.5 mg/mL of citric acid, 0.25 to 0.5 mg/mL of sodium citrate, 1.25 to 1.75 mg/mL of disodium phosphate dihydrate, 0.7 to 1.1 mg/mL of sodium dihydrogen phosphate dihydrate, and 6.0 to 6.4 mg/mL of sodium chloride. In certain embodiments, the pH of the formulation is adjusted with sodium hydroxide.

[0288] A polyol, which acts as a tonicifier and may stabilize the antibody, may also be included in the formulation. The polyol is added to the formulation in an amount which may vary with respect to the desired isotonicity of the formulation. In certain embodiments, the aqueous formulation may be isotonic. The amount of polyol added may also be altered with respect to the molecular weight of the polyol. For example, a lower amount of a monosaccharide (e.g., mannitol) may be added, compared to a disaccharide (such as trehalose). In certain embodiments, the polyol which may be used in the formulation as a tonicity agent is mannitol. In certain embodiments, the mannitol concentration may be about 5 to about 20 mg/mL. In certain embodiments, the concentration of mannitol may be about 7.5 to 15 mg/mL. In certain embodiments, the concentration of mannitol may be about 10-14 mg/mL. In certain embodiments, the concentration of mannitol may be about 12 mg/mL. In certain embodiments, the polyol sorbitol may be included in the formulation.

[0289] A detergent or surfactant may also be added to the formulation. Exemplary detergents include nonionic detergents such as polysorbates (e.g., polysorbates 20, 80 etc.) or poloxamers (e.g., poloxamer 188). The amount of detergent added is such that it reduces aggregation of the formulated antibody and/or minimizes the formation of particulates in the formulation and/or reduces adsorption. In certain embodiments, the formulation may include a surfactant which is a polysorbate. In certain embodiments, the formulation may contain the detergent polysorbate 80 or Tween 80. Tween 80 is a term used to describe polyoxyethylene (20) sorbitanmonooleate (see Fiedler, Lexikon der Hifsstoffe, Editio Cantor Verlag Aulendorf, 4th ed., 1996). In certain embodiments, the formulation may contain between about 0.1 mg/mL and about 10 mg/mL of polysorbate 80, or between about 0.5 mg/mL and about 5 mg/mL. In certain embodiments, about 0.1% polysorbate 80 may be added in the formulation.

[0290] In certain embodiments, the protein product of the present disclosure is formulated as a liquid formulation. The liquid formulation may be presented at a 10 mg/mL concentration in either a USP/Ph Eur type I 50R vial closed with a rubber stopper and sealed with an aluminum crimp seal closure. The stopper may be made of elastomer complying with USP and Ph Eur. In certain embodiments vials may be filled with 61.2 mL of the protein product solution in order to allow an extractable volume of 60 mL. In certain embodiments, the liquid formulation may be diluted with 0.9% saline solution.

[0291] In certain embodiments, the liquid formulation of the disclosure may be prepared as a 10 mg/mL concentration solution in combination with a sugar at stabilizing levels. In certain embodiments the liquid formulation may be prepared in an aqueous carrier. In certain embodiments, a stabilizer may be added in an amount no greater than that which may result in a viscosity undesirable or unsuitable for intravenous administration. In certain embodiments, the sugar may be disaccharides, e.g., sucrose. In certain embodiments, the liquid formulation may also include one or more of a buffering agent, a surfactant, and a preservative.

[0292] In certain embodiments, the pH of the liquid formulation may be set by addition of a pharmaceutically acceptable acid and/or base. In certain embodiments, the pharmaceutically acceptable acid may be hydrochloric acid. In certain embodiments, the base may be sodium hydroxide.

[0293] In addition to aggregation, deamidation is a common product variant of peptides and proteins that may occur during fermentation, harvest/cell clarification, purification, drug substance/drug product storage and during sample analysis. Deamidation is the loss of NH₃ from a protein forming a succinimide intermediate that can undergo hydrolysis. The succinimide intermediate results in a 17 dalton mass decrease of the parent peptide. The subsequent hydrolysis results in an 18 dalton mass increase. Isolation of the succinimide intermediate is difficult due to instability under aqueous conditions. As such, deamidation is typically detectable as a 1 dalton mass increase. Deamidation of an asparagine results in either aspartic or isoaspartic acid. The parameters affecting the rate of deamidation include pH, temperature, solvent dielectric constant, ionic strength, primary sequence, local polypeptide conformation and tertiary structure. The amino acid residues adjacent to Asn in the peptide chain affect deamidation rates. Gly and Ser following an Asn in protein sequences results in a higher susceptibility to deamidation.

[0294] In certain embodiments, the liquid formulation of the present disclosure may be preserved under conditions of pH and humidity to prevent deamination of the protein product.

[0295] The aqueous carrier of interest herein is one which is pharmaceutically acceptable (safe and non-toxic for administration to a human) and is useful for the preparation of a liquid formulation. Illustrative carriers include sterile water for injection (SWFI), bacteriostatic water for injection (BWFI), a pH buffered solution (e.g., phosphate-buffered saline), sterile saline solution, Ringer's solution or dextrose solution.

[0296] A preservative may be optionally added to the formulations herein to reduce bacterial action. The addition of a preservative may, for example, facilitate the production of a multi-use (multiple-dose) formulation.

[0297] Intravenous (IV) formulations may be the preferred administration route in particular instances, such as when a patient is in the hospital after transplantation receiving all drugs via the IV route. In certain embodiments, the liquid formulation is diluted with 0.9% sodium chloride solution before administration. In certain embodiments, the diluted drug product for injection is isotonic and suitable for administration by intravenous infusion.

[0298] In certain embodiments, a salt or buffer components may be added in an amount of 10 mM-200 mM. The salts and/or buffers are pharmaceutically acceptable and are derived from various known acids (inorganic and organic) with “base forming” metals or amines. In certain embodiments, the buffer may be phosphate buffer. In certain embodiments, the buffer may be glycinate, carbonate, citrate buffers, in which case, sodium, potassium or ammonium ions can serve as counterion.

[0299] A preservative may be optionally added to the formulations herein to reduce bacterial action. The addition of a preservative may, for example, facilitate the production of a multi-use (multiple-dose) formulation.

[0300] The aqueous carrier of interest herein is one which is pharmaceutically acceptable (safe and non-toxic for administration to a human) and is useful for the preparation of a liquid formulation. Illustrative carriers include sterile water for injection (SWFI), bacteriostatic water for injection (BWFI), a pH buffered solution (e.g., phosphate-buffered saline), sterile saline solution, Ringer's solution or dextrose solution.

[0301] The protein of the present disclosure could exist in a lyophilized formulation including the proteins and a lyoprotectant. The lyoprotectant may be sugar, e.g., disaccharides. In certain embodiments, the lyoprotectant may be sucrose or maltose. The lyophilized formulation may also include one or more of a buffering agent, a surfactant, a bulking agent, and/or a preservative.

[0302] The amount of sucrose or maltose useful for stabilization of the lyophilized drug product may be in a weight ratio of at least 1:2 protein to sucrose or maltose. In certain embodiments, the protein to sucrose or maltose weight ratio may be of from 1:2 to 1:5.

[0303] In certain embodiments, the pH of the formulation, prior to lyophilization, may be set by addition of a pharmaceutically acceptable acid and/or base. In certain embodiments the pharmaceutically acceptable acid may be hydrochloric acid. In certain embodiments, the pharmaceutically acceptable base may be sodium hydroxide.

[0304] Before lyophilization, the pH of the solution containing the protein of the present disclosure may be adjusted between 6 to 8. In certain embodiments, the pH range for the lyophilized drug product may be from 7 to 8.

[0305] In certain embodiments, a salt or buffer components may be added in an amount of 10 mM-200 mM. The salts and/or buffers are pharmaceutically acceptable and are derived from various known acids (inorganic and organic) with “base forming” metals or amines. In certain embodiments, the buffer may be phosphate buffer. In certain embodiments, the buffer may be glycinate, carbonate, citrate buffers, in which case, sodium, potassium or ammonium ions can serve as counterion.

[0306] In certain embodiments, a “bulking agent” may be added. A “bulking agent” is a compound which adds mass to a lyophilized mixture and contributes to the physical structure of the lyophilized cake (e.g., facilitates the production of an essentially uniform lyophilized cake which maintains an open pore structure). Illustrative bulking agents include mannitol, glycine, polyethylene glycol and sorbitol. The lyophilized formulations of the present invention may contain such bulking agents.

[0307] A preservative may be optionally added to the formulations herein to reduce bacterial action. The addition of a preservative may, for example, facilitate the production of a multi-use (multiple-dose) formulation.

[0308] In certain embodiments, the lyophilized drug product may be constituted with an aqueous carrier. The aqueous carrier of interest herein is one which is pharmaceutically acceptable (e.g., safe and non-toxic for administration to a human) and is useful for the preparation of a liquid formulation, after lyophilization. Illustrative diluents include SWFI, BWFI, a pH buffered solution (e.g., phosphate-buffered saline), sterile saline solution, Ringer's solution or dextrose solution.

[0309] In certain embodiments, the lyophilized drug product of the current disclosure is reconstituted with either SWFI, USP or 0.9% sodium chloride Injection, USP. During reconstitution, the lyophilized powder dissolves into a solution.

[0310] In certain embodiments, the lyophilized protein product of the instant disclosure is constituted to about 4.5 mL water for injection and diluted with 0.9% saline solution (sodium chloride solution).

[0311] Actual dosage levels of the active ingredients in the pharmaceutical compositions of this invention may be varied so as to obtain an amount of the active ingredient which is effective to achieve the desired therapeutic response for a particular patient, composition, and mode of administration, without being toxic to the patient.

[0312] The specific dose can be a uniform dose for each patient, for example, 50-5000 mg of protein. Alternatively, a patient's dose can be tailored to the approximate body weight or surface area of the patient. Other factors in determining the appropriate dosage can include the disease or condition to be treated or prevented, the severity of the disease, the route of administration, and the age, sex and medical condition of the patient. Further refinement of the calculations necessary to determine the appropriate dosage for treatment is routinely made by those skilled in the art, especially in light of the dosage information and assays disclosed herein. The dosage can also be determined through the use of known assays for determining dosages used in conjunction with appropriate dose-response data. An individual patient's dosage can be adjusted as the progress of the disease is monitored. Blood levels of the targetable construct or complex in a patient can be measured to see if the dosage needs to be adjusted to reach or maintain an effective concentration. Pharmacogenomics may be used to determine which targetable constructs and/or complexes, and dosages thereof, are most likely to be effective for a given individual (Schmitz et al., Clinica Chimica Acta 308: 43-53, 2001; Steimer et al., Clinica Chimica Acta 308: 33-41, 2001).

[0313] In general, dosages based on body weight are from about 0.01 μg to about 100 mg per kg of body weight, such as about 0.01 μg to about 100 mg/kg of body weight, about 0.01 μg to about 50 mg/kg of body weight, about 0.01 μg to about 10 mg/kg of body weight, about 0.01 μg to about 1 mg/kg of body weight, about 0.01 μg to about 100 μg/kg of body weight, about 0.01 μg to about 50 μg/kg of body weight, about 0.01 μg to about 10 μg/kg of body weight, about 0.01 μg to about 1 μg/kg of body weight, about 0.01 μg to about 0.1 μg/kg of body weight, about 0.1 μg to about 100 mg/kg of body weight, about 0.1 μg to about 50 mg/kg of body weight, about 0.1 μg to about 10 mg/kg of body weight, about 0.1 μg to about 1 mg/kg of body weight, about 0.1 μg to about 100 μg/kg of body weight, about 0.1 μg to about 10 μg/kg of body weight, about 0.1 μg to about 1 μg/kg of body weight, about 1 μg to about 100 mg/kg of body weight, about 1 μg to about 50 mg/kg of body weight, about 1 μg to about 10 mg/kg of body weight, about 1 μg to about 1 mg/kg of body weight, about 1 μg to about 100 μg/kg of body weight, about 1 μg to about 50 μg/kg of body weight, about 1 μg to about 10 μg/kg of body weight, about 10 μg to about 100 mg/kg of body weight, about 10 μg to about 50 mg/kg of body weight, about 10 μg to about 10 mg/kg of body weight, about 10 μg to about 1 mg/kg of body weight, about 10 μg to about 100 μg/kg of body weight, about 10 μg to about 50 μg/kg of body weight, about 50 μg to about 100 mg/kg of body weight, about 50 μg to about 50 mg/kg of body weight, about 50 μg to about 10 mg/kg of body weight, about 50 μg to about 1 mg/kg of body weight, about 50 μg to about 100 μg/kg of body weight, about 100 μg to about 100 mg/kg of body weight, about 100 μg to about 50 mg/kg of body weight, about 100 μg to about 10 mg/kg of body weight, about 100 μg to about 1 mg/kg of body weight, about 1 mg to about 100 mg/kg of body weight, about 1 mg to about 50 mg/kg of body weight, about 1 mg to about 10 mg/kg of body weight, about 10 mg to about 100 mg/kg of body weight, about 10 mg to about 50 mg/kg of body weight, about 50 mg to about 100 mg/kg of body weight.

[0314] Doses may be given once or more times daily, weekly, monthly or yearly, or even once every 2 to 20 years. Persons of ordinary skill in the art can easily estimate repetition rates for dosing based on measured residence times and concentrations of the targetable construct or complex in bodily fluids or tissues. Administration of the present invention could be intravenous, intraarterial, intraperitoneal, intramuscular, subcutaneous, intrapleural, intrathecal, intracavitary, by perfusion through a catheter or by direct intralesional injection. This may be administered once or more times daily, once or more times weekly, once or more times monthly, and once or more times annually. In some embodiments, the heterodimeric Fc-fused protein (e.g., a heterodimeric Fc-fused protein comprising IL-12 subunits) is administered intratumorally. In some embodiments, the heterodimeric Fc-fused protein is administered intratumorally at a lower dose or frequency than when administered systemically. In some embodiments, the heterodimeric Fc-fused protein is administered intratumorally following administration of a local anesthetic. In some embodiments, the heterodimeric Fc-fused protein is administered intratumorally under direct palpation of a tumor mass.

### IV. Therapeutic Applications

[0315] The invention provides methods for treating cancer using a heterodimeric Fc-fused binding protein described herein and/or a pharmaceutical composition described herein. The methods may be used to treat a variety of cancers by administering to a patient in need thereof an effective amount of a heterodimeric Fc-fused protein described herein. In some embodiments, the cancer that is treated by a method disclosed herein is a locally advanced malignancy. In some embodiments, the locally advanced malignancy can be fully resected. In some embodiments, the locally advanced malignancy has been fully resected, and the treatment is provided subsequent to the resection.

[0316] In some embodiments, a heterodimeric Fc-fused protein of the present invention (e.g., a heterodimeric Fc-fused protein comprising IL-12 subunits) is used for treating an advanced malignancy as a monotherapy. In some embodiments, a heterodimeric Fc-fused protein of the present invention (e.g., a heterodimeric Fc-fused protein comprising IL-12 subunits) is used as an adjuvant for active immunotherapy of severe infectious diseases. In some embodiments, a heterodimeric Fc-fused protein of the present invention (e.g., a heterodimeric Fc-fused protein comprising IL-12 subunits) is used as an adjuvant for prophylactic vaccination. In some embodiments, a heterodimeric Fc-fused protein of the present invention is used for treating myelosuppression following radiotherapy.

[0317] The present invention also provides a method of reducing hematopoietic toxicity. Hematopoietic toxicity can result from genetic, infective, or environmental causes, including but not limited to irradiation and chemotherapy. For example, in certain embodiments, the present invention provides a method of treating a disease or disorder associated with radiation (e.g., ionizing radiation, alpha radiation, beta radiation, gamma radiation, X radiation, or neutron radiation). For example, in certain embodiments, the present invention provides a method of treating myelosuppression following a radiation therapy, the method comprising administering to a patient in need thereof an effective amount of a heterodimeric Fc-fused protein or a formulation described herein. In certain embodiments, the dose of the radiation therapy is at least 1, 5, 10, 15, or 20 Gy. In certain embodiments, the radiation therapy causes damage in a system, organ, or tissue selected from the group consisting of bone marrow, lymphatic system, immune system, mucosal tissue, mucosal immune system, gastrointestinal system, cardiovascular system, nervous system, reproductive organs, prostate, ovaries, lung, kidney, skin and brain. In certain embodiments, the method of the present invention reduces the damage.

[0318] The methods provided herein are useful in treating myelosuppression resulting from radiation. Accordingly, in certain embodiments, the present invention provides a method of treating myelosuppression occurring in the context of an accidental exposure to radiation, the method comprising administering to a patient in need thereof a therapeutically effective amount of a heterodimeric Fc-fused protein or a formulation described herein.

[0319] In certain embodiments, the present invention provides a method of treating acute radiation syndrome (ARS), the method comprising administering to a patient in need thereof an effective amount of a heterodimeric Fc-fused protein or a formulation described herein. ARS includes but is not limited to hematopoietic radiation syndrome, gastrointestinal radiation syndrome, neurovascular radiation syndrome, and cutaneous radiation syndrome. For example, hematopoietic radiation syndrome results from, at least in part, depletion of the hematopoietic stem cell pool and shows signs of lymphopenia and granulocytopenia. Gastrointestinal syndrome results from, at least in part, damage of stem cells and progenitor cells located in the crypts and failure to replace the cells in the surface of the villi and shows signs of watery diarrhea, dehydration, electrolyte loss, gastrointestinal bleeding, and perforation. In certain embodiments, the method of treatment provided herein is conducted at the prodromal phase of the ARS. The prodromal phase is the initial phase of acute illness, characterized by the symptoms of nausea, vomiting, anorexia, fever, headache, and/or early skin erythema, typically within 1-3 days after the exposure to radiation. In certain embodiments, the method of treatment provided herein is conducted at the latent phase of the ARS. The latent phase is a phase characterized by improvement of symptoms but exhibition of lymphopenia and granulocytopenia in lab tests, and may last hours to weeks depending on the dose of exposure. Treatment in the prodromal phase or latent phase may mitigate the development of the syndromes in the affected systems, organs, and/or tissues. In certain embodiments, the method of treatment provided herein is conducted at the manifest illness phase of the ARS. Treatment in this phase may still promote recovery from the ARS.

[0320] The present invention also provides a method of increasing the survival, proliferation, differentiation, and/or activity of an immune cell, the method comprising contacting the immune cell with a heterodimeric Fc-fused protein or a formulation disclosed herein. In certain embodiments, the immune cell is a T cell (e.g., CD4⁺ T cells). In certain embodiments, the immune cell is an NK cell.

[0321] In certain embodiments, the heterodimeric Fc-fused protein of the present invention (e.g., a heterodimeric Fc-fused protein comprising IL-12 subunits) is used in treating a subject diagnosed with cancer. In certain embodiments, the cancer is bladder cancer, breast cancer, cervical cancer, colorectal cancer, esophageal cancer, gastric cancer, head and neck cancer, hepatocellular cancer, leukemia, lung cancer, lymphoma, mesothelioma, melanoma, myeloma, ovarian cancer, endometrial cancer, prostate cancer, pancreatic cancer, renal cell cancer, non-small cell lung cancer, small cell lung cancer, brain cancer, sarcoma, neuroblastoma, or squamous cell carcinoma of the head and neck cancerous cells. In certain embodiments, the cancer is colon cancer. In certain embodiments, the heterodimeric Fc-fused protein is administered as a monotherapy to a subject diagnosed with colon cancer. In certain embodiments, the cancer is melanoma. In certain embodiments, the heterodimeric Fc-fused protein is administered as a monotherapy to a subject diagnosed with melanoma. In certain embodiments, the cancer is breast cancer. In certain embodiments, the heterodimeric Fc-fused protein is administered as a monotherapy to a subject diagnosed with breast cancer.

[0322] In certain embodiments, the present disclosure provides a method of treating cancer, the method comprising administering to a patient only a single dose of a heterodimeric IL-12-Fc-fused protein. In certain embodiments, the single dose is in an amount sufficient to induce a complete response to the cancer. In certain embodiments, the single dose is in an amount sufficient to delay or prevent recurrence of the cancer.

[0323] In certain embodiments, the present disclosure provides a method of treating cancer, the method comprising administering to a patient only a single dose of a heterodimeric IL-12-Fc-fused protein comprising a first polypeptide comprising the amino acid sequence of SEQ ID NO:290 and a second polypeptide comprising the amino acid sequence of SEQ ID NO:291, or a formulation comprising the heterodimeric IL-12-Fc-fused protein and a pharmaceutically acceptable carrier.

[0324] In certain embodiments, a single dose of a heterodimeric IL-12-Fc-fused protein comprising a first polypeptide comprising the amino acid sequence of SEQ ID NO:290 and a second polypeptide comprising the amino acid sequence of SEQ ID NO:291, or a formulation comprising the heterodimeric IL-12-Fc-fused protein (e.g., comprising SEQ ID NO:290 and SEQ ID NO:291) and a pharmaceutically acceptable carrier is in an amount sufficient to induce a complete response to the cancer. In certain embodiments, the single dose is in an amount sufficient to delay or prevent recurrence of the cancer. In certain embodiments, a recurrence of a completely treated cancer (e.g., complete response after treatment with an IL-12-Fc-fused protein of the present invention) is delayed or prevented by 6 months to 72 months or more (e.g., 6 months, 12 months, 24 months, 36 months, 48 months, 60 months, 72 months, 84 months, or 96 months).

[0325] In certain embodiments, the cancer treated with a single dose or more of a heterodimeric IL-12-Fc-fused protein (e.g., comprising a first polypeptide comprising the amino acid sequence of SEQ ID NO:290 and a second polypeptide comprising the amino acid sequence of SEQ ID NO:291) is a metastatic cancer. In certain embodiments, the metastatic cancer is a local, regional, or distant metastatic cancer. In certain embodiments, a single or multiple dose of a heterodimeric IL-12-Fc-fused protein (e.g., comprising a first polypeptide comprising the amino acid sequence of SEQ ID NO:290 and a second polypeptide comprising the amino acid sequence of SEQ ID NO:291) treats a distant cancer, which is not the primary cancer of the source organ or tissue and/or the direct target of a treatment regimen, by an abscopal effect. In certain embodiments the abscopal effect of a heterodimeric IL-12-Fc-fused protein is enhanced during and/or after a treatment plan including radiation and/or chemotherapy. In certain embodiments, a single or multiple dose of a heterodimeric IL-12-Fc-fused protein (e.g., comprising a first polypeptide comprising the amino acid sequence of SEQ ID NO:290 and a second polypeptide comprising the amino acid sequence of SEQ ID NO:291) treats cancer in a patient by inducing a systemic anti-tumor response, determined, for example, by increased expression of IFNγ, CXCL9, and/or CXCL10 in the serum and/or the tumor of the patient.

### V. Combination Therapy

[0326] Another aspect of the invention provides for combination therapy. A multi-specific binding protein described herein can be used in combination with additional therapeutic agents to treat the cancer.

[0327] In certain embodiments, the heterodimeric Fc-fused protein of the present invention (e.g., a heterodimeric Fc-fused protein comprising IL-12 subunits) is administered as a combination therapy to treat a subject diagnosed with cancer. In certain embodiments, the cancer is bladder cancer, breast cancer, cervical cancer, colorectal cancer, esophageal cancer, gastric cancer, head and neck cancer, hepatocellular cancer, leukemia, lung cancer, lymphoma, mesothelioma, melanoma, myeloma, ovarian cancer, endometrial cancer, prostate cancer, pancreatic cancer, renal cell cancer, non-small cell lung cancer, small cell lung cancer, brain cancer, sarcoma, neuroblastoma, or squamous cell carcinoma of the head and neck cancerous cells. In certain embodiments, the cancer is colon cancer. In certain embodiments, the heterodimeric Fc-fused protein is administered as a combination therapy to a subject diagnosed with colon cancer. In certain embodiments, the cancer is melanoma. In certain embodiments, the heterodimeric Fc-fused protein is administered as a combination therapy to a subject diagnosed with melanoma. In certain embodiments, the cancer is breast cancer. In certain embodiments, the heterodimeric Fc-fused protein is administered as a combination therapy to a subject diagnosed with breast cancer.

[0328] In some embodiments, a heterodimeric Fc-fused protein of the present invention (e.g., a heterodimeric Fc-fused protein comprising IL-12 subunits) is used in treating an advanced malignancy in combination with another therapeutic agent selected from: cytotoxic chemotherapy; radiotherapy; an antibody that targets a molecule involved in an anti-tumor immune response, such as CTLA-4, PD-1, PD-L₁, or TGF-β; an antibody that acts by ADCC on a tumor-associated antigen; a multispecific antibody binding NKG2D, CD16, and a tumor-associated antigen, optionally administered in combination with an antibody that targets PD-1 or PD-L1; a personalized cancer vaccine; an oncolytic cancer vaccine; and a personalized vaccine administered in combination with an antibody that targets PD-1 or PD-L1.

[0329] In some embodiments, a heterodimeric Fc-fused protein of the present invention (e.g., a heterodimeric Fc-fused protein comprising IL-12 subunits) is used in treating malignancy (e.g., an advanced malignancy) in combination with another therapy including, but not limited to, an NK-targeting therapy (e.g., CAR-NK therapy), an antibody therapy, a checkpoint inhibitor therapy, an additional cytokine therapy, an innate immune system agonist therapy, a chemotherapy, a target agent therapy, a radiotherapy, an adoptive NK therapy, a stem cell transplant (SCT) therapy, an agonistic antibody, a chimeric antigen receptor (CAR) T cell therapy, a T-cell receptor (TCR) engineered therapy, a multi-specific binding protein (TriNKET), an agent that induces cellular senescence, and a vaccine and/or oncolytic virus therapy. In some embodiments, a heterodimeric Fc-fused protein of the present invention is used in treating malignancy (e.g., an advanced malignancy) in combination with two or more additional therapies selected from an NK-targeting therapy (e.g., CAR-NK therapy), an antibody therapy, a checkpoint inhibitor therapy, an additional cytokine therapy, an innate immune system agonist therapy, a chemotherapy, a target agent therapy, a radiotherapy, an adoptive NK therapy, a stem cell transplant (SCT) therapy, an agonistic antibody, a chimeric antigen receptor (CAR) T cell therapy, a T-cell receptor (TCR) engineered therapy, a multi-specific binding protein (TriNKET), an agent that induces cellular senescence, and a vaccine and/or oncolytic virus therapy.

[0330] In some embodiments, a heterodimeric Fc-fused protein of the present invention (e.g., a heterodimeric Fc-fused protein comprising IL-12) is used in treating locally advanced malignancy that can be fully resected, in combination with a cancer vaccine or an antibody that targets PD-1 or PD-L1.

[0331] Proteins of the invention can also be used as an adjunct to surgical removal of the primary lesion.

[0332] The amount of heterodimeric Fc-fused protein of the present invention (e.g., a heterodimeric Fc-fused protein comprising IL-12) and additional therapeutic agent and the relative timing of administration may be selected in order to achieve a desired combined therapeutic effect. For example, when administering a combination therapy to a patient in need of such administration, the therapeutic agents in the combination, or a pharmaceutical composition or compositions comprising the therapeutic agents, may be administered in any order such as, for example, sequentially, concurrently, together, simultaneously and the like. Further, for example, a heterodimeric Fc-fused protein may be administered during a time when the additional therapeutic agent(s) exerts its prophylactic or therapeutic effect, or vice versa.

[0333] As disclosed herein, the methods of the invention include coadministration of the combination of a heterodimeric Fc-fused protein (e.g., a heterodimeric Fc-fused protein comprising IL-12 subunits) and an additional therapeutic agent. As disclosed herein, the methods of the invention include coadministration of the combination of a heterodimeric Fc-fused protein comprising IL-12 subunits and an additional therapeutic agent.

[0334] Coadministered encompasses methods where a heterodimeric Fc-fused protein (e.g., a heterodimeric Fc-fused protein comprising IL-12 subunits) and an additional therapeutic agent are given simultaneously, where a heterodimeric Fc-fused protein and an additional therapeutic agent are given sequentially, and where either one of, or both of, a heterodimeric Fc-fused protein and an additional therapeutic agent are given intermittently or continuously, or any combination of: simultaneously, sequentially, intermittently and/or continuously. The skilled artisan will recognize that intermittent administration is not necessarily the same as sequential because intermittent also includes a first administration of an agent and then another administration later in time of that very same agent. Moreover, the skilled artisan understands that intermittent administration also encompasses sequential administration in some embodiments because intermittent administration does include interruption of the first administration of an agent with an administration of a different agent before the first agent is administered again. Further, the skilled artisan will also know that continuous administration can be accomplished by a number of routes including intravenous drip (IV infusion) or feeding tubes, etc.

[0335] Furthermore, and in a more general way, the term “coadministered” encompasses any and all methods where the individual administration of a heterodimeric Fc-fused protein and the individual administration of an additional therapeutic agent to a subject overlap during any timeframe.

[0336] The frequency of administration of a heterodimeric Fc-fused protein or an additional therapeutic agent to a subject is known in the art as Qnd or qnd where n is the frequency in days for successive administration of that agent. For example, Q3d would be an administration of an agent once every three (3) days. In certain embodiments, the method comprises administering either one of, or both of, or any combinations thereof, a heterodimeric Fc-fused protein and/or an additional therapeutic agent to a subject for Q1d, Q2d, Q3d, Q4d, Q5d, Q6d, Q7d, Q8d, Q9d, Q10d, Q14d, Q21d, Q28d, Q30d, Q90d, Q120d, Q240d, or Q365d.

[0337] In certain embodiments, either one of or both of a heterodimeric Fc-fused protein and/or an additional therapeutic agent are administered intermittently. In certain embodiments, the method includes administering either one of, or both of a heterodimeric Fc-fused protein or an additional therapeutic agent to a subject with a delay of at least ten (10) minutes, fifteen (15) minutes, twenty (20) minutes, thirty (30) minutes, forty (40) minutes, sixty (60) minutes, two (2) hours, three (3) hour, four (4) hours, six (6) hours, eight (8) hours, ten (10) hours, twelve (12) hours, fourteen (14) hours, eighteen (18) hours, twenty-four (24) hours, thirty-six (36) hours, forty-eight (48) hours, three (3) days, four (4) days, five (5) days, six (6) days, seven (7) days, eight (8) days, nine (9) days, ten (10) days, eleven (11) days, twelve (12) days, thirteen (13) days, fourteen (14) days, three (3) weeks, or four (4) weeks between administrations. In certain embodiments, the administration with a delay follows a pattern where one of, or both of, or any combination thereof, of a heterodimeric Fc-fused protein and/or an additional therapeutic agent are administered continuously for a given period of time from about ten (10) minutes to about three hundred and sixty five (365) days and then is not administered for a given period of time from about ten (10) minutes to about thirty (30) days.

[0338] In certain embodiments, either one of, or any combination of, a heterodimeric Fc-fused protein and/or an additional therapeutic agent are administered intermittently while the other is given continuously. In certain embodiments, the combination of the first effective amount of a heterodimeric Fc-fused protein is administered sequentially with the second effective amount of an additional therapeutic agent.

[0339] In certain embodiments, a heterodimeric Fc-fused protein and an additional therapeutic agent are administered simultaneously. In certain embodiments, the combination of the first effective amount of a heterodimeric Fc-fused protein is administered sequentially with the second effective amount of an additional therapeutic agent. In such embodiments, the combination is also said to be “coadministered” since the term includes any and all methods where the subject is exposed to both components in the combination. However, such embodiments are not limited to the combination being given just in one formulation or composition. It may be that certain concentrations of a heterodimeric Fc-fused protein and the additional therapeutic agent are more advantageous to deliver at certain intervals and as such, the first effective amount and second effective amount may change according to the formulation being administered.

[0340] In certain embodiments, a heterodimeric Fc-fused protein and the additional therapeutic agent are administered simultaneously or sequentially. In certain embodiments, the first effective amount of a heterodimeric Fc-fused protein is administered sequentially after the second effective amount of an additional therapeutic agent. In certain embodiments, the second effective amount of an additional therapeutic agent is administered sequentially after the first effective amount of a heterodimeric Fc-fused protein.

[0341] In certain embodiments, the combination of a heterodimeric Fc-fused protein (e.g., a heterodimeric Fc-fused protein comprising IL-12 subunits) and an additional therapeutic agent is administered in one formulation. In certain embodiments, the combination is administered in two (2) compositions where the first effective amount of a heterodimeric Fc-fused protein is administered in a separate formulation from the formulation of the second effective amount of an additional therapeutic agent. In certain embodiments, the combination is administered in two (2) compositions where the first effective amount of the heterodimeric Fc-fused protein is administered in a separate formulation from the formulation of the second effective amount of an additional therapeutic agent. In certain embodiments, the first effective amount of a heterodimeric Fc-fused protein is administered sequentially after the second effective amount of an additional therapeutic agent. In certain embodiments, the second effective amount of an additional therapeutic agent is administered sequentially after the first effective amount of a heterodimeric Fc-fused protein. In certain embodiments, a heterodimeric Fc-fused protein and the additional therapeutic agent are administered; and subsequently both the heterodimeric Fc-fused protein and the additional therapeutic agent are administered intermittently for at least twenty-four (24) hours. In certain embodiments, the heterodimeric Fc-fused protein and the additional therapeutic agent are administered on a non-overlapping every other day schedule.

[0342] In certain embodiments, the first effective amount of a heterodimeric Fc-fused protein is administered no less than four (4) hours after the second effective amount of an additional therapeutic agent. In certain embodiments, the first effective amount of a heterodimeric Fc-fused protein is administered no less than ten (10) minutes, no less than fifteen (15) minutes, no less than twenty (20) minutes, no less than thirty (30) minutes, no less than forty (40) minutes, no less than sixty (60) minutes, no less than one (1) hour, no less than two (2) hours, no less than four (4) hours, no less than six (6) hours, no less than eight (8) hours, no less than ten (10) hours, no less than twelve (12) hours, no less than twenty four (24) hours, no less than two (2) days, no less than four (4) days, no less than six (6) days, no less than eight (8) days, no less than ten (10) days, no less than twelve (12) days, no less than fourteen (14) days, no less than twenty one (21) days, or no less than thirty (30) days after the second effective amount of an additional therapeutic agent. In certain embodiments, the second effective amount of an additional therapeutic agent is administered no less than ten (10) minutes, no less than fifteen (15) minutes, no less than twenty (20) minutes, no less than thirty (30) minutes, no less than forty (40) minutes, no less than sixty (60) minutes, no less than one (1) hour, no less than two (2) hours, no less than four (4) hours, no less than six (6) hours, no less than eight (8) hours, no less than ten (10) hours, no less than twelve (12) hours, no less than twenty four (24) hours, no less than two (2) days, no less than four (4) days, no less than six (6) days, no less than eight (8) days, no less than ten (10) days, no less than twelve (12) days, no less than fourteen (14) days, no less than twenty one (21) days, or no less than thirty (30) days after the first effective amount of a heterodimeric Fc-fused protein.

[0343] In certain embodiments, either one of, or both of a heterodimeric Fc-fused protein and/or additional therapeutic agent are administered by a route selected from the group consisting of: intravenous, subcutaneous, cutaneous, oral, intramuscular, and intraperitoneal. In certain embodiments, either one of, or both of a heterodimeric Fc-fused protein and/or additional therapeutic agent are administered by intravenously. In certain embodiments, either one of, or both of, or any combination thereof, a heterodimeric Fc-fused protein and/or additional therapeutic agent are administered orally.

[0344] It is understood by the skilled artisan that the unit dose forms of the present disclosure may be administered in the same or different physical forms, i.e. orally via capsules or tablets and/or by liquid via IV infusion, and so on. Moreover, the unit dose forms for each administration may differ by the particular route of administration. Several various dosage forms may exist for either one of, or both of, the combination of a heterodimeric Fc-fused protein and additional therapeutic agents. Because different medical conditions can warrant different routes of administration, the same components of the combination described herein may be exactly alike in composition and physical form and yet may need to be given in differing ways and perhaps at differing times to alleviate the condition. For example, a condition such as persistent nausea, especially with vomiting, can make it difficult to use an oral dosage form, and in such a case, it may be necessary to administer another unit dose form, perhaps even one identical to other dosage forms used previously or afterward, with an inhalation, buccal, sublingual, or suppository route instead or as well. The specific dosage form may be a requirement for certain combinations of a heterodimeric Fc-fused protein and additional therapeutic agents, as there may be issues with various factors like chemical stability or pharmacokinetics.

### NK-Targeting Therapy

[0345] In certain embodiments, the heterodimeric Fc-fused protein therapy is combined with NK targeting therapies. For example, in an embodiment, the heterodimeric Fc-fused protein is coadministered with a therapeutic agent that targets NKp46. In certain embodiments, the therapeutic agent that targets NKp46 also binds CD16, one or more tumor-associated antigens, or a combination thereof. Exemplary therapeutic agents that target NKp46 are described in more detail in U.S. Application No. US20170198038A1, herein incorporated by reference for all purposes.

[0346] In certain embodiments, the heterodimeric Fc-fused protein therapy is combined with bi- and tri-specific killer engagers (BiKEs and TriKEs) therapies, including BiKE and TriKE therapies targeting NK cells. BiKEs and TriKEs are constructed from a single heavy (VH) and light (VL) chain of the variable region of each antibody of interest. VH and VL domains are joined by a short flexible polypeptide linker to prevent dissociation. BiKEs and TriKEs are described in more detail in U.S. Application Nos. US20180282386A1 and US20180258396A1, herein incorporated by reference for all purposes. BiKEs and TriKEs can contain a binding domain specific for an NK cell.

[0347] In certain embodiments, BiKE and TriKE therapies are used in combination with the heterodimeric Fc-fused protein therapy to treat subjects known or suspected of having High-risk Myelodysplastic Syndrome, Acute Myelogenous Leukemia, Systemic Mastocytosis, or Mast Cell Leukemia. In certain embodiments, BiKE and TriKE therapies are administered as a single course of 3 weekly treatment blocks. In certain embodiments, a treatment block comprises 4 consecutive 24-hour continuous infusions (approximately 96 hours) followed by a 72 hour break. In certain embodiments, BiKE and TriKE therapies are administered at a dose of 5 μg/kg/day, 10 μg/kg/day, 25 μg/kg/day, 50 μg/kg/day, 100 μg/kg/day, or 200 μg/kg/day. In certain embodiments, BiKE and TriKE therapies are administered at a dose of at least 5 μg/kg/day, at least 10 μg/kg/day, at least 25 μg/kg/day, at least 50 μg/kg/day, at least 100 μg/kg/day, or at least 200 μg/kg/day. In certain embodiments, BiKE and TriKE therapies are administered at a dose of at least 1 μg/kg/day. In certain embodiments, BiKE and TriKE therapies are administered at a dose of at least 5 μg/kg/day. In certain embodiments, BiKE and TriKE therapies are administered at a dose of at least 200 μg/kg/day. In certain embodiments, BiKE and TriKE therapies are administered at a dose of at least 500 μg/kg/day. In certain embodiments, BiKE and TriKE therapies are administered at a dose of at least 1000 μg/kg/day. In certain embodiments, BiKE and TriKE therapies are administered at a dose of 200 μg/kg/day or less. In certain embodiments, BiKE and TriKE therapies are administered at a dose of 500 μg/kg/day or less. In certain embodiments, BiKE and TriKE therapies are administered at a dose of 1000 μg/kg/day or less. In certain embodiments, BiKE and TriKE therapies are administered at a dose of 1-200 μg/kg/day. In certain embodiments, BiKE and TriKE therapies are administered at a dose of 5-200 μg/kg/day. In certain embodiments, BiKE and TriKE therapies are administered at a dose of 1-500 μg/kg/day. In certain embodiments, BiKE and TriKE therapies are administered at a dose of 1-1000 μg/kg/day. In certain embodiments, BiKE and TriKE therapies are administered at a dose of 5-500 μg/kg/day. In certain embodiments, BiKE and TriKE therapies are administered at a dose of 5-1000 μg/kg/day. In certain embodiments, BiKE and TriKE therapies are administered at a maximum-tolerated dose. In certain embodiments, BiKE and TriKE therapies are administered at less than maximum-tolerated dose.

### Multi-Specific Binding Protein (“TriNKET”) Therapy

[0348] In certain embodiments, the heterodimeric Fc-fused protein therapy is combined with a therapy comprising a multi-specific binding protein, which comprises: (a) a first antigen-binding site that binds NKG2D; (b) a second antigen-binding site that binds a tumor-associated antigen; and (c) an antibody Fc domain or a portion thereof sufficient to bind CD16, or a third antigen-binding site that binds CD16 (“TriNKET”) (for example, multi-specific binding proteins comprising various NKG2D-binders and tumor-associated antigen-binding sites described in international publication no. WO 2019/157332, whose contents relating to the multi-specific binding proteins described therein are incorporated by reference herein), to treat subjects known or suspected of having cancer. Exemplary tumor-associated antigens include, but are not limited to, HER2, CD20, CD33, B-cell maturation antigen (BCMA), EpCAM, CD2, CD19, CD25, CD30, CD38, CD40, CD52, CD70, CLL1/CLEC12A, FLT3, EGFR/ERBB1, IGF1R, HER3/ERBB3, HER4/ERBB4, MUC1, cMET, SLAMF7, PSCA, MICA, MICB, TRAILR1, TRAILR2, MAGE-A3, B7.1, B7.2, CTLA4, HLA-E, and PD-L1.

[0349] In certain embodiments, the heterodimeric Fc-fused protein therapy is combined with a therapy comprising a dose of a multi-specific binding protein based on body weight. For example, doses of a multi-specific binding protein based on body weight are from about 0.01 μg to about 100 mg per kg of body weight, such as about 0.01 μg to about 100 mg/kg of body weight, about 0.01 μg to about 50 mg/kg of body weight, about 0.01 μg to about 10 mg/kg of body weight, about 0.01 μg to about 1 mg/kg of body weight, about 0.01 μg to about 100 μg/kg of body weight, about 0.01 μg to about 50 μg/kg of body weight, about 0.01 μg to about 10 μg/kg of body weight, about 0.01 μg to about 1 μg/kg of body weight, about 0.01 μg to about 0.1 μg/kg of body weight, about 0.1 μg to about 100 mg/kg of body weight, about 0.1 μg to about 50 mg/kg of body weight, about 0.1 μg to about 10 mg/kg of body weight, about 0.1 μg to about 1 mg/kg of body weight, about 0.1 μg to about 100 μg/kg of body weight, about 0.1 μg to about 10 μg/kg of body weight, about 0.1 μg to about 1 μg/kg of body weight, about 1 μg to about 100 mg/kg of body weight, about 1 μg to about 50 mg/kg of body weight, about 1 μg to about 10 mg/kg of body weight, about 1 μg to about 1 mg/kg of body weight, about 1 μg to about 100 μg/kg of body weight, about 1 μg to about 50 μg/kg of body weight, about 1 μg to about 10 μg/kg of body weight, about 10 μg to about 100 mg/kg of body weight, about 10 μg to about 50 mg/kg of body weight, about 10 μg to about 10 mg/kg of body weight, about 10 μg to about 1 mg/kg of body weight, about 10 μg to about 100 μg/kg of body weight, about 10 μg to about 50 μg/kg of body weight, about 50 μg to about 100 mg/kg of body weight, about 50 μg to about 50 mg/kg of body weight, about 50 μg to about 10 mg/kg of body weight, about 50 μg to about 1 mg/kg of body weight, about 50 μg to about 100 μg/kg of body weight, about 100 μg to about 100 mg/kg of body weight, about 100 μg to about 50 mg/kg of body weight, about 100 μg to about 10 mg/kg of body weight, about 100 μg to about 1 mg/kg of body weight, about 1 mg to about 100 mg/kg of body weight, about 1 mg to about 50 mg/kg of body weight, about 1 mg to about 10 mg/kg of body weight, about 10 mg to about 100 mg/kg of body weight, about 10 mg to about 50 mg/kg of body weight, about 50 mg to about 100 mg/kg of body weight.

[0350] In certain embodiments, the heterodimeric Fc-fused protein therapy is combined with a therapy comprising doses of a multi-specific binding protein given once or more times daily, weekly, monthly or yearly, or even once every 2 to 20 years. Persons of ordinary skill in the art can easily estimate repetition rates for dosing based on measured residence times and concentrations of the targetable construct or complex in bodily fluids or tissues. Administration of a multi-specific binding protein could be intravenous, intraarterial, intraperitoneal, intramuscular, subcutaneous, intrapleural, intrathecal, intracavitary, by perfusion through a catheter or by direct intralesional injection. This may be administered once or more times daily, once or more times weekly, once or more times monthly, and once or more times annually.

### Chimeric Antigen Receptors (CARs) Therapy

[0351] In certain embodiments, the heterodimeric Fc-fused protein therapy is combined with a CAR therapy. The term “chimeric antigen receptor” or alternatively a “CAR” refers to a recombinant polypeptide construct comprising at least an extracellular antigen binding domain, a transmembrane domain and an intracellular signaling domain comprising a functional signaling domain derived from a stimulatory molecule (also referred to herein as a “primary signaling domain”).

[0352] Accordingly, in certain embodiments, the CAR comprises an extracellular antigen-binding site that binds tumor-associated antigen, a transmembrane domain, and an intracellular signaling domain comprising a primary signaling domain. In certain embodiments, the CAR further comprises one or more functional signaling domains derived from at least one costimulatory molecule (also referred to as a “costimulatory signaling domain”).

[0353] In one embodiment, the CAR comprises a chimeric fusion protein comprising a tumor-associated antigen-binding domain (e.g., tumor-associated antigen-binding scFv domain) comprising a heavy chain variable domain and a light chain variable domain as an extracellular antigen binding domain, a transmembrane domain, and an intracellular signaling domain comprising a primary signaling domain. In one embodiment, the CAR comprises a chimeric fusion protein comprising a tumor-associated antigen-binding domain (e.g., tumor-associated antigen-binding scFv domain) comprising a heavy chain variable domain and a light chain variable domain as an extracellular antigen binding domain, a transmembrane domain and an intracellular signaling domain comprising a costimulatory signaling domain and a primary signaling domain. In certain embodiments, the CAR comprises a chimeric fusion protein comprising a tumor-associated antigen-binding domain (e.g., tumor-associated antigen-binding scFv domain) comprising a heavy chain variable domain and a light chain variable domain as an extracellular antigen binding domain, a transmembrane domain, and an intracellular signaling domain comprising two costimulatory signaling domains and a primary signaling domain. In one embodiment, the CAR comprises a chimeric fusion protein comprising a tumor-associated antigen-binding domain comprising a heavy chain variable domain and a light chain variable domain as an extracellular antigen binding domain, a transmembrane domain, and an intracellular signaling domain comprising at least two costimulatory signaling domains and a primary signaling domain.

[0354] With respect to the transmembrane domain, in various embodiments, the CAR is designed to comprise a transmembrane domain that is fused to the extracellular domain of the CAR. In one embodiment, the transmembrane domain is one that naturally is associated with one of the domains in the CAR. In some instances, the transmembrane domain can be selected or modified by amino acid substitution to avoid binding of such domains to the transmembrane domains of the same or different surface membrane proteins to minimize interactions with other members of the receptor complex. In another embodiment, the transmembrane domain is capable of homodimerization with another CAR on the CAR T cell surface. In another embodiment, the amino acid sequence of the transmembrane domain may be modified or substituted so as to minimize interactions with the binding domains of the native binding partner present in the same CAR T cell.

[0355] The transmembrane domain may be derived from any naturally occurring membrane-bound or transmembrane protein. In one embodiment, the transmembrane region is capable of signaling to the intracellular domain(s) whenever the CAR has bound to a target. In some embodiments, the transmembrane domain comprises the transmembrane region(s) of one or more proteins selected from the group consisting of TCR α chain, TCR β chain, TCR chain, CD28, CD3E, CD45, CD4, CD5, CD8, CD9, CD16, CD22, CD33, CD37, CD64, CD80, CD86, CD134, CD137, and CD154. In some embodiments, the transmembrane domain comprises the transmembrane region(s) of one or more protein(s) selected from the group consisting of KIRDS2, OX40, CD2, CD27, LFA-1 (CD11a, CD18), ICOS (CD278), 4-1BB (CD137), GITR, CD40, BAFFR, HVEM (LIGHTR), SLAMF7, NKp80 (KLRF1), NKp44, NKp30, NKp46, CD160, CD19, IL2Rβ, IL2Rγ, IL7Rα, ITGA1, VLA1, CD49a, ITGA4, IA4, CD49D, ITGA6, VLA-6, CD49f, ITGAD, CD11d, ITGAE, CD103, ITGAL, CD11a, LFA-1, ITGAM, CD11b, ITGAX, CD11c, ITGB1, CD29, ITGB2, CD18, LFA-1, ITGB7, TNFR2, DNAM1 (CD226), SLAMF4 (CD244, 2B4), CD84, CD96 (Tactile), CEACAM1, CRTAM, Ly9 (CD229), CD160 (BY55), PSGL1, CD100 (SEMA4D), SLAMF6 (NTB-A, Ly108), SLAM (SLAMF1, CD150, IPO-3), BLAME (SLAMF8), SELPLG (CD162), LTBR, PAG/Cbp, NKG2D, and NKG2C.

[0356] The extracellular tumor-associated antigen-binding domain (e.g., tumor-associated antigen-binding scFv domain) can be connected to the transmembrane domain by a hinge region. A variety of hinges can be employed, including but not limited to the human Ig hinge (e.g., an IgG4 hinge, an IgD hinge), a Gly-Ser linker, a (G45)₄ linker, a KIR2DS2 hinge, and a CD8a hinge.

[0357] The intracellular signaling domain of the CAR is responsible for activation of at least one of the specialized functions of the immune cell (e.g., cytolytic activity or helper activity, including the secretion of cytokines, of a T cell) in which the CAR has been placed in. Thus, as used herein, the term “intracellular signaling domain” refers to the portion of a protein which transduces an effector function signal and directs the cell to perform a specialized function. While usually the entire intracellular signaling domain can be employed, in many cases it is not necessary to use the entire chain. To the extent that a truncated portion of the intracellular signaling domain is used, such truncated portion may be used in place of the intact chain as long as it transduces the effector function signal. The term intracellular signaling domain is thus meant to include any truncated portion of the intracellular signaling domain sufficient to transduce the effector function signal.

[0358] The intracellular signaling domain of the CAR comprises a primary signaling domain (i.e. a functional signaling domain derived from a stimulatory molecule) and one or more costimulatory signaling domains (i.e. functional signaling domains derived from at least one costimulatory molecule).

[0359] As used herein, the term “stimulatory molecule” refers to a molecule expressed by an immune cell, e.g., a T cell, an NK cell, or a B cell, that provide the cytoplasmic signaling sequence(s) that regulate activation of the immune cell in a stimulatory way for at least some aspect of the immune cell signaling pathway. In one embodiment, the signal is a primary signal that is initiated by, for instance, binding of a TCR/CD3 complex with an MHC molecule loaded with a peptide, and which leads to mediation of a T cell response, including, but not limited to, proliferation, activation, differentiation, and the like.

[0360] Primary signaling domains that act in a stimulatory manner may contain signaling motifs which are known as immunoreceptor tyrosine-based activation motifs or ITAMs. Examples of ITAM containing cytoplasmic signaling sequences that are of particular use in the present disclosure include those derived from CD3 zeta, common FcR gamma (FCER1G), Fc gamma RIIa, FcR beta (Fc Epsilon Rib), CD3 gamma, CD3 delta, CD3 epsilon, CD79a, CD79b, DAP10, and DAP12. In one embodiment, the primary signaling domain in any one or more CARs comprises a cytoplasmic signaling sequence derived from CD3-zeta.

[0361] In some embodiments, the primary signaling domain is a functional signaling domain of TCR zeta, FcR gamma, FcR beta, CD3 gamma, CD3 delta, CD3 epsilon, CD5, CD22, CD79a, CD79b, CD66d, 4-1BB, and/or CD3-zeta. In an embodiment, the intracellular signaling domain comprises a functional signaling domain of CD3 zeta, common FcR gamma (FCER1G), Fc gamma RIIa, FcR beta (Fc Epsilon Rib), CD3 gamma, CD3 delta, CD3 epsilon, CD79a, CD79b, DAP10, and/or DAP12. In a particular embodiment, the primary signaling domain is a functional signaling domain of the zeta chain associated with the T cell receptor complex.

[0362] As used herein, the term “costimulatory molecule” refers to a cognate binding partner on a T cell that specifically binds with a costimulatory ligand, thereby mediating a costimulatory response by the T cell, such as, but not limited to, proliferation. A costimulatory molecule is a cell surface molecule other than an antigen receptor or its ligands that is required for an efficient response of lymphocytes to an antigen. Examples of such molecules include CD27, CD28, 4-1BB (CD137), OX40, CD30, CD40, PD-1, ICOS, lymphocyte function-associated antigen-1 (LFA-1, CD11a/CD18), CD2, CD7, CD258 (LIGHT), NKG2C, B7-H3, and a ligand that specifically binds with CD83, and the like. Further examples of such costimulatory molecules include CD5, ICAM-1, GITR, BAFFR, HVEM (LIGHTR), SLAMF7, NKp80 (KLRF1), NKp44, NKp30, NKp46, CD160, CD19, CD4, CD8alpha, CD8beta, IL2R beta, IL2R gamma, IL7R alpha, ITGA4, VLA1, CD49a, ITGA4, IA4, CD49D, ITGA6, VLA-6, CD49f, ITGAD, CD11d, ITGAE, CD103, ITGAL, CD11a, LFA-1, ITGAM, CD11b, ITGAX, CD11c, ITGB1, CD29, ITGB2, CD18, LFA-1, ITGB7, NKG2D, NKG2C, TNFR2, TRANCE/RANKL, DNAM1 (CD226), SLAMF4 (CD244, 2B4), CD84, CD96 (Tactile), CEACAM1, CRTAM, Ly9 (CD229), CD160 (BY55), PSGL1, CD100 (SEMA4D), CD69, SLAMF6 (NTB-A, Ly108), SLAM (SLAMF1, CD150, IPO-3), BLAME (SLAMF8), SELPLG (CD162), LTBR, LAT, GADS, SLP-76, PAG/Cbp, and a ligand that specifically binds with CD83. In some embodiments, the costimulatory signaling domain of the CAR is a functional signaling domain of a costimulatory molecule described herein, e.g., OX40, CD27, CD28, CD30, CD40, PD-1, CD2, CD7, CD258, NKG2C, B7-H3, a ligand that binds to CD83, ICAM-1, LFA-1 (CD11a/CD18), ICOS and 4-1BB (CD137), or any combination thereof.

[0363] As used herein, the term “signaling domain” refers to the functional portion of a protein which acts by transmitting information within the cell to regulate cellular activity via defined signaling pathways by generating second messengers or functioning as effectors by responding to such messengers.

[0364] The cytoplasmic signaling sequences within the cytoplasmic signaling portion of the CAR may be linked to each other in a random or specified order. Optionally, a short oligo- or polypeptide linker, for example, between 2 and 10 amino acids in length may form the linkage.

### Antibody Therapy

[0365] in certain embodiments, the heterodimeric Fc-fused protein therapy is combined with an antibody-therapy to treat subjects known or suspected of having cancer.

[0366] In certain embodiments, the heterodimeric Fc-fused protein is combined with a therapy comprising an anti-HER2 binding domain, such as an anti-HER2 antibody or anti-HER2 antibody platforms (e.g., a bi-specific or tri-specific antibody comprising an anti-HER2 binding domain, anti-HER2 antibody-drug conjugates, or anti-HER2 CAR). Anti-HER2 antibodies include, but are not limited to, trastuzumab (HERCEPTIN®—Roche/Genentech; Kanjinti—Amgen), pertuzumab (PERJETA®—Roche/Genentech), and MGAH22 (described in detail in U.S. Pat. No. 8,802,093, herein incorporated by reference for all purposes). Anti-HER2 antibody platforms include, but are not limited to, ertumaxomab (REXOMUN®—Creative Biolabs) and trastuzumab emtansine (ado-trastuzumab emtansine/T-DM1; KADCYLA®—Roche/Genentech). In certain embodiments, the anti-HER2 binding domain therapy is used in combination with the heterodimeric Fc-fused protein therapy to treat subjects known or suspected of having cancer. In certain embodiments, the anti-HER2 binding domain therapy is administered by IV infusion. In certain embodiments, the anti-HER2 binding domain therapy is administered at a dose of 1 mg/kg/day, 2 mg/kg/day, 3 mg/kg/day, 4 mg/kg/day, 5 mg/kg/day, 6 mg/kg/day, 7 mg/kg/day, 8 mg/kg/day, 9 mg/kg/day, 10 mg/kg/day. In certain embodiments, the anti-HER2 binding domain therapy is administered at a dose of at least 1 mg/kg/day, at least 2 mg/kg/day, at least 3 mg/kg/day, at least 4 mg/kg/day, at least 5 mg/kg/day, at least 6 mg/kg/day, at least 7 mg/kg/day, at least 8 mg/kg/day, at least 9 mg/kg/day, at least 10 mg/kg/day. In certain embodiments, the anti-HER2 binding domain therapy is administered at a dose of less than 1 mg/kg/day.

[0367] In certain embodiments, the anti-HER2 binding domain therapy is used in combination with the heterodimeric Fc-fused protein therapy to treat subjects known or suspected of having breast cancer, e.g., a subject diagnosed with metastatic HER2-overexpressing breast cancer. In certain embodiments, the anti-HER2 binding domain therapy is administered at 4 mg/kg/day. In certain embodiments, the anti-HER2 binding domain therapy is administered at 4 mg/kg/day by IV infusion over 90 minutes. In certain embodiments, the anti-HER2 binding domain therapy is administered at 2 mg/kg/day. In certain embodiments, the anti-HER2 binding domain therapy is administered at 2 mg/kg/day by IV infusion over 30 minutes. In certain embodiments, the anti-HER2 binding domain therapy is administered at an initial dose of 4 mg/kg/day, then subsequently administered weekly at 2 mg/kg/day. In certain embodiments, the anti-HER2 binding domain therapy is administered at an initial dose of 4 mg/kg/day, then subsequently administered weekly at 2 mg/kg/day for 52 weeks.

[0368] In certain embodiments, the anti-HER2 binding domain therapy is used in combination with the heterodimeric Fc-fused protein therapy to treat subjects known or suspected of having gastric cancer, e.g., a subject diagnosed with metastatic HER2-overexpressing gastric cancer. In certain embodiments, the anti-HER2 binding domain therapy is administered at 8 mg/kg/day. In certain embodiments, the anti-HER2 binding domain therapy is administered at 8 mg/kg/day by IV infusion over 90 minutes. In certain embodiments, the anti-HER2 binding domain therapy is administered at 6 mg/kg/day. In certain embodiments, the anti-HER2 binding domain therapy is administered at 6 mg/kg/day by IV infusion over 30-90 minutes. In certain embodiments, the anti-HER2 binding domain therapy is administered at an initial dose of 8 mg/kg/day, then subsequently administered weekly at 6 mg/kg/day. In certain embodiments, the anti-HER2 binding domain therapy is administered at an initial dose of 8 mg/kg/day, then subsequently administered weekly at 6 mg/kg/day for 52 weeks.

[0369] In certain embodiments, the heterodimeric Fc-fused protein therapy is combined with a therapy comprising an anti-CD20 binding domain, such as an anti-CD20 antibody or anti-CD20 antibody platforms (e.g., a bi-specific or tri-specific antibody comprising an anti-CD20 binding domain, anti-CD20 antibody-drug conjugates, or anti-CD20 CAR). Anti-CD20 antibodies include, but are not limited to, rituximab (RITUXAN®—Roche/Genentech), ocrelizumab (OCREVUS®—Roche/Genentech), obinutuzumab (GAZYVA®—Roche/Genentech), ofatumumab (ARZERRA®—Novartis), and veltuzumab. In certain embodiments, the anti-CD20 binding domain therapy is used in combination with the heterodimeric Fc-fused protein therapy to treat subjects known or suspected of having cancer.

[0370] In certain embodiments, the anti-CD20 binding domain therapy is administered by IV infusion. In certain embodiments, the anti-CD20 binding domain therapy is administered at a dose of 100 mg/m², 200 mg/m², 300 mg/m², 400 mg/m², 500 mg/m², 600 mg/m², 700 mg/m², 800 mg/m², 900 mg/m², or 1000 mg/m². In certain embodiments, the anti-CD20 binding domain therapy is administered at a dose of 375 mg/m². In certain embodiments, the anti-CD20 binding domain therapy is administered at a dose of at least 100 mg/m², at least 200 mg/m², at least 300 mg/m², at least 400 mg/m², at least 500 mg/m², at least 600 mg/m², at least 700 mg/m², at least 800 mg/m², at least 900 mg/m², or at least 1000 mg/m². In certain embodiments, the anti-CD20 binding domain therapy is administered at a dose of less than 400 mg/m². In certain embodiments, the anti-CD20 binding domain therapy is administered at a dose of less than 375 mg/m².

[0371] In certain embodiments, the anti-CD20 binding domain therapy is used in combination with the heterodimeric Fc-fused protein therapy to treat subjects known or suspected of having Non-Hodgkin's Lymphoma (NHL). In certain embodiments, the anti-CD20 binding domain therapy is administered at a dose of 375 mg/m² by IV-infusion. In certain embodiments, the anti-CD20 binding domain therapy is administered at a dose less than 375 mg/m² by IV-infusion.

[0372] In certain embodiments, the anti-CD20 binding domain therapy is used in combination with the heterodimeric Fc-fused protein therapy to treat subjects known or suspected of having Chronic Lymphocytic Leukemia (CLL). In certain embodiments, the anti-CD20 binding domain therapy is administered at a dose of 375 mg/m² by IV-infusion in a first cycle, and at a dose of 500 mg/m² by IV-infusion per cycle in an additional 2-6 cycles. In certain embodiments, the anti-CD20 binding domain therapy is administered at a dose less than 375 mg/m² by IV-infusion. The combined anti-CD20 binding domain and heterodimeric Fc-fused protein therapy can be used in combination with fludarabine and cyclophosphamide (FC).

[0373] In certain embodiments, the anti-CD20 binding domain therapy is used in combination with the heterodimeric Fc-fused protein therapy to treat subjects known or suspected of having Rheumatoid Arthritis (RA). In certain embodiments, the anti-CD20 binding domain therapy is administered as two doses of 1000 mg, doses separated 2 weeks, by IV-infusion. In certain embodiments, the anti-CD20 binding domain therapy is administered as two doses of 1000 mg, doses separated 2 weeks, by IV-infusion up to 24 weeks. In certain embodiments, the combined anti-CD20 binding domain and heterodimeric Fc-fused protein therapy is coadministered with methotrexate.

[0374] In certain embodiments, the heterodimeric Fc-fused protein therapy is combined with a therapy comprising an antibody therapy comprising an agonist antibody. In certain embodiments, the agonist antibody is an anti-4-1BB antibody, an anti-CD137 antibody, an anti-FAP antibody, an anti-OX40 antibody, an anti-CD40 antibody, an anti-GITR antibody, or an anti-CD27 antibody. In certain embodiments, the agonist antibody is a bispecific antibody. In certain embodiments, the agonist antibody is a multispecific antibody, e.g., abispecific antibody, comprising two or more antigen binding domains selected from an anti-4-1BB antibody, an anti-CD137 antibody, an anti-FAP antibody, an anti-OX40 antibody, an anti-CD40 antibody, an anti-GITR antibody, or an anti-CD27 antibody. An illustrative example is a bispecific agonist antibody targeting 4-1BB and CD137, such as utomilumab (Pfizer).

### Checkpoint Inhibitor Therapy

[0375] In certain embodiments, the heterodimeric Fc-fused protein therapy can be combined with a checkpoint inhibitor therapy. Illustrative immune checkpoint molecules that can be targeted for blocking or inhibition include, but are not limited to, CTLA-4, 4-1BB (CD137), 4-1BBL (CD137L), PDL1, PDL2, PD1, B7-H3, B7-H4, BTLA, HVEM, TIM3, GAL9, LAG3, TIM3, B7H3, B7H4, VISTA, KIR, 2B4 (belongs to the CD2 family of molecules and is expressed on all NK, γδ, and memory CD8+α(αβ) T cells), CD160 (also referred to as BY55), and CGEN-15049. Immune checkpoint inhibitors include antibodies, or antigen binding fragments thereof, or other binding proteins, that bind to and block or inhibit the activity of one or more of CTLA-4, PDL1, PDL2, PD1, B7-H3, B7-H4, BTLA, HVEM, TIM3, GAL9, LAG3, TIM3, B7H3, B7H4, VISTA, KIR, 2B4, CD160, and CGEN-15049. Illustrative immune checkpoint inhibitors include Illustrative immune checkpoint inhibitors include nivolumamb (anti-PD-1; OPDIVO®—BMS), AMP224 (anti-PD-1; NCI), pembrolizumab (anti-PD-1; MK-3475/KEYTRUDA®—Merck), pidilizumab (anti-PD-1 antibody; CT-011—Teva/CureTech), atezolizumab (anti-PD-L1; TECENTRIQ®—Roche/Genentech), durvalumab (anti-PD-L1; MEDI4736/IMFINZI®—Medimmune/AstraZeneca), avelumab (anti-PD-L1; BAVENCIO®—Pfizer), BMS-936559 (anti-PD-L1—BMS), ipilimumab (anti-CTLA-4; YERVOY®—BMS), tremelimumab (anti-CTLA-4; Medimmune/AstraZeneca), lirilumab (anti-KIR; BMS), monalizumab (anti-NKG2A; Innate Pharma/AstraZeneca), BY55 (anti-CD160), anti-OX40. anti-TIM3, and anti-LAG3.

[0376] In certain embodiments, the checkpoint inhibitor therapy is used in combination with the heterodimeric Fc-fused protein therapy to treat subjects known or suspected of having cancer. In certain embodiments, the checkpoint inhibitor therapy is administered by IV infusion. In certain embodiments, the checkpoint inhibitor therapy is administered by IV infusion over 30 minutes. In certain embodiments, the checkpoint inhibitor therapy is administered every 3 weeks. In certain embodiments, the checkpoint inhibitor therapy is administered at a dose of 100 mg, 200 mg, 300 mg, 400 mg, 500 mg, 600 mg, 700 mg, 800 mg, 900 mg, or 1000 mg. In certain embodiments, the checkpoint inhibitor therapy is administered at a dose of 200 mg. In certain embodiments, the checkpoint inhibitor therapy is administered at a dose of at least 100 mg, at least 200 mg, at least 300 mg, at least 400 mg, at least 500 mg, at least 600 mg, at least 700 mg, at least 800 mg, at least 900 mg, or at least 1000 mg. In certain embodiments, the checkpoint inhibitor therapy is administered at a dose of less than 200 mg. In certain embodiments, the checkpoint inhibitor therapy is used in combination with the heterodimeric Fc-fused protein therapy to treat subjects known or suspected of having Melanoma, Non-Small Cell Lung Cancer (NSCLC), Head and Neck Squamous Cell Cancer (HNSCC), Classical Hodgkin Lymphoma (cHL), Primary Mediastinal Large B-Cell Lymphoma (PMBCL), Urothelial Carcinoma, Microsatellite Instability-High Cancer, Gastric Cancer, Cervical Cancer, Hepatocellular Carcinoma (HCC), Merkel Cell Carcinoma (MCC), Renal Cell Carcinoma (RCC).

### Additional Cytokine Therapy

[0377] In some embodiments, the heterodimeric Fc-fused protein therapy is combined with one or more additional cytokine therapies, one or more chemokine therapies, or combinations thereof. In some embodiments, the heterodimeric Fc-fused protein therapy is combined with one or more additional cytokine therapies. In some embodiments, the heterodimeric Fc-fused protein therapy is combined with one or more chemokine therapies. In some embodiments, the cytokine therapy comprises a pro-inflammatory cytokine, a Th1 cytokine, or a Th2 cytokine. In some embodiments, the cytokine therapy comprises a recombinant human cytokine or chemokine.

[0378] In some embodiments, the cytokine therapy includes a cytokine that is an interleukin (e.g., IL-1, IL-2, IL-6, IL-7, IL-8, IL-12, IL-13, IL-15, IL-16, IL-18, IL-21 and IL-22). In some embodiments, the cytokine therapy includes a cytokine that is growth factor (e.g., tumor necrosis factor (TNF), LT, EMAP-II, GM-CSF, FGF and PDGF) In some embodiments, the cytokine therapy comprises an anti-inflammatory cytokine (e.g., IL-4, IL-10, IL-11, IL-13 and TGF).

[0379] In some embodiments, the chemokine therapy includes a pro-inflammatory chemokine (e.g., GRO-α, GRO-b, LIX, GCP-2, MIG, IP10, I-TAC, and MCP-1, RANTES, Eotaxin, SDF-1, and MIP3a). In some embodiments, the chemokine therapy includes a chemokine receptor. In some embodiments, the chemokine therapy includes a CXC chemokine receptor (e.g., CXCR1, CXCR2, CXCR3, CXCR4, CXCR5, CXCR6, and CXCR7), a CC chemokine receptor (e.g., CCR1, CCR2, CCR3, CCR4, CCR5, CCR6, CCR7, CCR8, CCR9, CCR10, and CCR11), a CX3C chemokine receptor (e.g., CX3C11), or a XC chemokine receptor (e.g., XCR1). In some embodiments, the chemokine therapy comprises a G protein-linked transmembrane receptor.

[0380] In some embodiments, the cytokine therapy comprises a cytokine therapy that synergizes with the IL-12 signaling. In some embodiments, the cytokine therapy comprises an IL-2 cytokine or a derivative thereof. In some embodiments, the IL-2 therapy is aldesleukin (Proleukin—Prometheus Therapeutics). In some embodiments, the IL-2 therapy and/or aldesleukin is administered intravenously. In some embodiments, the cytokine therapy comprises an IL-15 cytokine or a derivative thereof. In some embodiments, the IL-15 therapy is ALT-803 (Altor Bioscience) or NKTR-255 (Nektar). In some embodiments, the IL-15 therapy, NKTR-255, and/or ALT-803 is administered subcutaneously. In some embodiments, the chemokine therapy comprises a CXCL9 chemokine, a CXCL10 chemokine, or derivatives thereof.

[0381] In some embodiments, the cytokine or chemokine therapy includes administering a cytokine or chemokine to a subject. In some embodiments, the cytokine or chemokine therapy includes administering a recombinant cytokine or chemokine to a subject. In some embodiments, the cytokine or chemokine therapy includes engineering a cell to produce the cytokine or chemokine. In some embodiments, the cytokine or chemokine therapy includes engineering a cell ex vivo, in vitro, or in vivo to produce the cytokine or chemokine.

[0382] In some embodiments, the cytokine or chemokine therapy includes engineering a cell to produce the cytokine or chemokine using a viral vector-based delivery platform such as vaccinia, fowlpox, self-replicating alphavirus, marabavirus, adenovirus (See, e.g., Tatsis et al., Adenoviruses, Molecular Therapy (2004) 10, 616-629), a lentivirus, including but not limited to second, third or hybrid second/third generation lentivirus and recombinant lentivirus of any generation designed to target specific cell types or receptors (See, e.g., Hu et al., Immunization Delivered by Lentiviral Vectors for Cancer and Infectious Diseases, Immunol Rev. (2011) 239(1): 45-61, Sakuma et al., Lentiviral vectors: basic to translational, Biochem J. (2012) 443(3):603-18, Cooper et al., Rescue of splicing-mediated intron loss maximizes expression in lentiviral vectors containing the human ubiquitin C promoter, Nucl. Acids Res. (2015) 43 (1): 682-690, Zufferey et al., Self-Inactivating Lentivirus Vector for Safe and Efficient In Vivo Gene Delivery, J. Virol. (1998) 72 (12): 9873-9880), or an adeno-associated virus (“AAV”) vector, as described in more detail in U.S. Pat. No. 5,173,414; Tratschin et al, Mol. Cell. Biol. 5:3251-3260 (1985); Tratschin, et al, Mol. Cell, Biol. 4:2072-2081 (1984); Hermonat &amp; Muzyczka, PNAS 81:64666470 (1984); and Samuiski et al, J. Virol. 63:03822-3828 (1989)). In some embodiments, the cytokine or chemokine therapy includes engineering a cell to produce the cytokine or chemokine using a LNP, liposome, or an exosome. In some embodiments, the cytokine or chemokine therapy includes engineering a cell to produce the cytokine or chemokine using genome editing, such as using a nuclease-based genome editing systems (e.g., a Clustered Regularly Interspaced Short Palindromic Repeats (CRISPR) family, a Transcription activator-like effector nuclease (TALEN), a zinc-finger nuclease (ZFN), and a homing endonuclease (HE) based genome editing system or a derivative thereof). In some embodiments, the cytokine or chemokine therapy includes engineering a cell to produce the cytokine or chemokine using electroporation.

### Innate Immune System Agonist Therapy

[0383] In some embodiments, the heterodimeric Fc-fused protein therapy is combined with one or more innate immune system agonists.

[0384] In some embodiments, the innate immune system agonist comprises a toll-like receptor (TLR) agonist. In some embodiments, the TLR agonist comprises a TLR1/2, TLR2/6, TLR3, TLR4, TLR7, TLR8, TLR7/8, or TLR9 agonist. In some embodiments, a TLR2/6 agonist comprises lipoproteins, such as bacterial lipoproteins or derivatives, such as Pam2CSK4. In some embodiments, a TLR1/2 agonist comprises lipoproteins. In some embodiments, a TLR3 agonist comprises a dsRNA analog, such as rintatolimod (AMPLIGEN®—Hemispherx Biopharma) or poly IC-LC (e.g., HILTONOL®). In some embodiments, a TLR4 agonist comprises lipopolysaccharide (LPS, also referred to as endotoxin) or derivatives, such as lipid A. In some embodiments, a TLR7 agonist comprises a ssRNA or derivatives or imidazoquinoline derivatives including, but not limited to, resiquimod (also referred to as R848), imiquimod (ZYCLARA®, Aldara—Medicis), and gardiquimod. In some embodiments, a TLR7 agonist is also a TLR8 agonist, such as imiquimod or Medi-9197 (AstraZeneca/MedImmune). In some embodiments, a TLR9 agonist comprises a CpG-containing oligodeoxynucleotide (CpG-ODN) or SD-101 (Dynavax).

[0385] In some embodiments, the innate immune system agonist comprises a Stimulator of interferon genes (STING) agonist. In some embodiments, the STING agonist comprises a cyclic-di-nucleotide (CDN). Is some embodiments, the CDN comprises a cyclic-di-AMP, a cyclic-di-GMP, or a cyclic-GMP-AMP (cGAMP). In some embodiments, the STING agonist comprises a nucleic acid (e.g., DNA or RNA) that stimulates cGAS. In some embodiments, the STING agonist is ADU-S100 (also referred to as MIW815—Aduro/Novartis).

### Chemotherapy

[0386] In certain embodiments, the heterodimeric Fc-fused protein therapy is combined with one or more chemotherapies. In certain embodiments, the heterodimeric Fc-fused protein therapy is combined with one or more chemotherapies to treat a subject diagnosed with cancer. Examples of chemotherapy agents include aldesleukin, alvocidib, antineoplaston AS2-1, antineoplaston A10, anti-thymocyte globulin, amifostine trihydrate, aminocamptothecin, arsenic trioxide, beta alethine, Bcl-2 family protein inhibitor ABT-263, ABT-199, BMS-345541, bortezomib (VELCADE®), bryostatin 1, busulfan, carboplatin, campath-1H, CC-5103, carmustine, caspofungin acetate, clofarabine, cisplatin, Cladribine (LEUSTARIN®), Chlorambucil (LEUKERAN®), Curcumin, cyclosporine, Cyclophosphamide (Cyloxan, Endoxan, Endoxana, Cyclostin), cytarabine, denileukin diftitox, dexamethasone, DT PACE, docetaxel, dolastatin 10, Doxorubicin (ADRIAMYCIN®, ADRIBLASTINE®), doxorubicin hydrochloride, enzastaurin, epoetin alfa, etoposide, Everolimus (RAD001), fenretinide, filgrastim, melphalan, mesna, Flavopiridol, Fludarabine (FLUDARA®), Geldanamycin (17-AAG), ifosfamide, irinotecan hydrochloride, ixabepilone, Lenalidomide (REVLIMID®, CC-5013), lymphokine-activated killer cells, melphalan, methotrexate, mitoxantrone hydrochloride, motexafin gadolinium, mycophenolate mofetil, nelarabine, oblimersen (GENASENSE®) Obatoclax (GX15-070), oblimersen, octreotide acetate, omega-3 fatty acids, oxaliplatin, paclitaxel, PD0332991, PEGylated liposomal doxorubicin hydrochloride, pegfilgrastim, Pentstatin (NIPENT®), perifosine, Prednisolone, Prednisone, R-roscovitine (SELICILIB®, CYC202), recombinant interferon alfa, recombinant interleukin-12, recombinant interleukin-11, recombinant flt3 ligand, recombinant human thrombopoietin, rituximab, sargramostim, sildenafil citrate, simvastatin, sirolimus, Styryl sulphones, tacrolimus, tanespimycin, Temsirolimus (CC1-779), Thalidomide, therapeutic allogeneic lymphocytes, thiotepa, tipifarnib, VELCADE® (BORTEZOMIB® or PS-341), Vincristine (ONCOVIN®), vincristine sulfate, vinorelbine ditartrate, Vorinostat (SAHA), and FR (fludarabine, rituximab), CHOP (cyclophosphamide, doxorubicin, vincristine, prednisone), CVP (cyclophosphamide, vincristine and prednisone), FCM (fludarabine, cyclophosphamide, mitoxantrone), FCR (fludarabine, cyclophosphamide, rituximab), hyperCVAD (hyperfractionated cyclophosphamide, vincristine, doxorubicin, dexamethasone, methotrexate, cytarabine), ICE (iphosphamide, carboplatin and etoposide), MCP (mitoxantrone, chlorambucil, and prednisolone), R-CHOP (rituximab plus CHOP), R-CVP (rituximab plus CVP), R-FCM (rituximab plus FCM), R-ICE (rituximab-ICE), and R-MCP (R-MCP).

[0387] In certain embodiments, the heterodimeric Fc-fused protein therapy is combined with one or more chemotherapies to treat a subject diagnosed with colon cancer, rectal cancer, or colorectal cancer (CRC). In certain embodiments, the chemotherapy comprises FOLFOX (5-FU, leucovorin, and oxaliplatin/Eloxatin), FOLFIRI (leucovorin, 5-FU, and irinotecan/Camptosar), FOLFOXIRI (leucovorin, 5-FU, oxaliplatin, and irinotecan), CapeOx (capecitabine and oxaliplatin), 5-FU coadministered with leucovorin, capecitabine (XELODA®) alone, or Trifluridine and tipiracil (LONSURF®). In certain embodiments, the chemotherapy comprises a VEGF targeting agent, such as bevacizumab (AVASTIN®), ziv-aflibercept (ZALTRAP®), ramucirumab (CYRAMZA®), or Regorafenib (STIVARGA®), or an EGFR targeting agent such as cetuximab (ERBITUX) or panitumumab (VECTIBIX®). In certain embodiments, the chemotherapy coadministers a chemotherapy selected from FOLFOX, FOLFIRI, FOLFOXIRI, CapeOx, 5-FU coadministered with leucovorin, capecitabine alone, and Trifluridine/tipiracil together with a VEGF targeting agent or an EGFR targeting agent.

[0388] In certain embodiments, the heterodimeric Fc-fused protein therapy is combined with one or more chemotherapies to treat a subject diagnosed with breast cancer. In certain embodiments, the chemotherapy comprises doxorubicin (ADRIAMYCIN®), pegylated liposomal doxorubicin, epirubicin (ELLENCE®), paclitaxel (Taxol), docetaxel (TAXOTERE®), albumin-bound paclitaxel (ABRAXANE®), 5-fluorouracil (5-FU), cyclophosphamide (CYTOXAN®), carboplatin (PARAPLATIN®), cisplatin, vinorelbine (NAVELBINE®), capecitabine (XELODA), gemcitabine (GEMZAR®), ixabepilone (IXEMPRA®), or eribulin (HALAVEN). In certain embodiments, the chemotherapy comprises a combination of two or more chemotherapies selected from doxorubicin (ADRIAMYCIN®), pegylated liposomal doxorubicin, epirubicin (ELLENCE®), paclitaxel (Taxol), docetaxel (TAXOTERE®), albumin-bound paclitaxel (ABRAXANE®), 5-fluorouracil (5-FU), cyclophosphamide (CYTOXAN®), carboplatin (PARAPLATIN®), cisplatin, vinorelbine (NAVELBINE®), capecitabine (XELODA®), gemcitabine (GEMZAR®), ixabepilone (IXEMPRA®), and eribulin (HALAVEN®).

[0389] In certain embodiments, the heterodimeric Fc-fused protein therapy is combined with one or more chemotherapies to treat a subject diagnosed with melanoma/skin-cancer. In certain embodiments, the chemotherapy comprises dacarbazine (also called DTIC), temozolomide, nab-paclitaxel, paclitaxel, cisplatin, carboplatin, or vinblastine.

### Targeted Agent Therapy

[0390] In certain embodiments, the heterodimeric Fc-fused protein therapy is combined with one or more targeted agents. In general, targeted agents act on specific molecular targets, such as targets associated with cancer. Targeted agents are differentiated from standard chemotherapies in that standard chemotherapies act on all rapidly dividing normal and cancerous cells. Targeted agents include, but are not limited to, a hormone therapy, a signal transduction inhibitor, a gene expression modulator, an apoptosis inducer, an angiogenesis inhibitor, an immunotherapy, a toxin delivery molecule (e.g., an antibody drug-conjugate), and a kinase inhibitor. In certain embodiments, a targeted agent comprises a receptor agonist or ligand.

[0391] In certain embodiments, the heterodimeric Fc-fused protein therapy is combined with one or more targeted agents to treat a subject diagnosed with colon cancer, rectal cancer, or colorectal cancer (CRC). In certain embodiments, the targeted agent comprises cetuximab (ERBITUX®), panitumumab (VECTIBIX®), bevacizumab (AVASTIN®), ziv-aflibercept (ZALTRAP®), regorafenib (STIVARGA®), ramucirumab (CYRAMZA®), nivolumab (OPDIVO®), or ipilimumab (YERVOY®).

[0392] In certain embodiments, the heterodimeric Fc-fused protein therapy is combined with one or more targeted agents to treat a subject diagnosed with breast cancer. In certain embodiments, the targeted agent comprises everolimus (AFINITOR®), tamoxifen (NOLVADEX®), toremifene (FARESTON®), trastuzumab (HERCEPTIN®), fulvestrant (FASLODEX®), anastrozole (ARIMIDEX®), exemestane (AROMASIN®), lapatinib (TYKERB®), letrozole (FEMARA®), pertuzumab (PERJETA®), ado-trastuzumab emtansine (KADCYLA®), palbociclib (IBRANCE®), ribociclib (KISQALI®), neratinib maleate (NERLYNX™), abemaciclib (VERZENIO™), olaparib (LYNPARZA™) atezolizumab (TECENTRIQ®), or alpelisib (PIQRAY®).

[0393] In certain embodiments, the heterodimeric Fc-fused protein therapy is combined with one or more targeted agents to treat a subject diagnosed with melanoma/skin-cancer. In certain embodiments, the targeted agent comprises Vismodegib (ERIVEDGE®), sonidegib (ODOMZO®), ipilimumab (YERVOY®), vemurafenib (ZELBORAF®), trametinib (MEKINIST®), dabrafenib (TAFINLAR®), pembrolizumab (KEYTRUDA®), nivolumab (OPDIVO®), cobimetinib (COTELLIC™), alitretinoin (PANRETIN®), avelumab (BAVENCIO®), encorafenib (BRAFTOVI™), binimetinib (MEKTOVI®), or cemiplimab-rwlc (LIBTAYO®).

[0394] In certain embodiments, the heterodimeric Fc-fused protein therapy is combined with a receptor agonist or ligand therapy. In certain embodiments, the receptor agonist or ligand therapy comprises an agonist antibody. In certain embodiments, the receptor agonist or ligand therapy comprises a receptor ligand, such as 4-1BBL or CD40L.

### Radiotherapy

[0395] In some embodiments, the heterodimeric Fc-fused protein therapy is combined with radiotherapy. In certain embodiments, the heterodimeric Fc-fused protein therapy is combined with a radioisotope particle, such as indium In-111, yttrium Y-90, or iodine 1-131. Examples of combination therapies include, but are not limited to, Iodine-131 tositumomab (BEXXAR®), Yttrium-90 ibritumomab tiuxetan (ZEVALIN®), and BEXXAR® with CHOP. In certain embodiments, the radiotherapy comprises external-beam radiation therapy (EBRT), internal radiation therapy (brachytherapy), endocavitary radiation therapy, interstitial brachytherapy, radioembolization, hypofractionated radiation therapy, intraoperative radiation therapy (IORT), 3D-conformal radiotherapy, stereotactic radiosurgery (SRS), or stereotactic body radiation therapy (SBRT).

[0396] In certain embodiments, the heterodimeric Fc-fused protein therapy is combined with one or more radiotherapies to treat a subject diagnosed with colon cancer, rectal cancer, or colorectal cancer (CRC). In certain embodiments, the radiotherapy comprises external-beam radiation therapy (EBRT), internal radiation therapy (brachytherapy), endocavitary radiation therapy, interstitial brachytherapy, or radioembolization.

[0397] In certain embodiments, the heterodimeric Fc-fused protein therapy is combined with one or more radiotherapies to treat a subject diagnosed with breast cancer. In certain embodiments, the radiotherapy comprises external-beam radiation therapy, hypofractionated radiation therapy, intraoperative radiation therapy (IORT), or 3D-conformal radiotherapy.

[0398] In certain embodiments, the heterodimeric Fc-fused protein therapy is combined with one or more radiotherapies to treat a subject diagnosed with melanoma/skin-cancer. In certain embodiments, the radiotherapy comprises stereotactic radiosurgery (SRS; e.g., using a Gamma Knife or linear accelerator) or stereotactic body radiation therapy (SBRT).

### Vaccine and Oncolytic Viruses Therapy

[0399] In some embodiments, the heterodimeric Fc-fused protein therapy is combined with one or more immunogenic compositions, e.g., a vaccine composition or an oncolytic virus, capable of raising a specific immune response, e.g., a tumor-specific immune response.

[0400] In some embodiments, the heterodimeric Fc-fused protein therapy is combined with a vaccine composition. Vaccine compositions typically comprise a plurality of antigens and or neoantigens specific for the tumor to be targeted. Vaccine compositions can also be referred to as vaccines.

[0401] In some embodiments, a vaccine composition further comprises an adjuvant and/or a carrier. In some embodiments, a vaccine composition associates with a carrier such as a protein or an antigen-presenting cell such as a dendritic cell (DC) capable of presenting the peptide to a T-cell. In some embodiments, carriers are scaffold structures, for example a polypeptide or a polysaccharide, to which an antigen or neoantigen, is capable of being associated.

[0402] In general, adjuvants are any substance whose admixture into a vaccine composition increases or otherwise modifies the immune response to an antigen or neoantigen. Optionally, adjuvants are conjugated covalently or non-covalently. The ability of an adjuvant to increase an immune response to an antigen is typically manifested by a significant or substantial increase in an immune-mediated reaction, or reduction in disease symptoms. For example, an increase in humoral immunity is typically manifested by a significant increase in the titer of antibodies raised to the antigen, and an increase in T-cell activity is typically manifested in increased cell proliferation, or cellular cytotoxicity, or cytokine secretion. An adjuvant may also alter an immune response, for example, by changing a primarily humoral or Th response into a primarily cellular, or Th response. Suitable adjuvants include, but are not limited to 1018 ISS, alum, aluminium salts, Amplivax, AS15, BCG, CP-870,893, CpG7909, CyaA, dSLIM, GM-CSF, IC30, IC31, Imiquimod, ImuFact IMP321, IS Patch, ISS, ISCOMATRIX, JuvImmune, LipoVac, MF59, monophosphoryl lipid A, Montanide IMS 1312, Montanide ISA 206, Montanide ISA 50V, Montanide ISA-51, OK-432, OM-174, OM-197-MP-EC, ONTAK, PepTel vector system, PLG microparticles, resiquimod, SRL172, Virosomes and other Virus-like particles, YF-17D, VEGF trap, R848, beta-glucan, Pam3Cys, Aquila's QS21 stimulon (Aquila Biotech, Worcester, Mass., USA) which is derived from saponin, mycobacterial extracts and synthetic bacterial cell wall mimics, and other proprietary adjuvants such as Ribi's Detox. Quil or Superfos. Adjuvants such as incomplete Freund's or GM-CSF are useful. Several immunological adjuvants (e.g., MF59) specific for dendritic cells and their preparation have been described previously (Dupuis M, et al., Cell Immunol. 1998; 186(1):18-27; Allison A C; Dev Biol Stand. 1998; 92:3-11). Cytokines can also be used. Several cytokines have been directly linked to influencing dendritic cell migration to lymphoid tissues (e.g., TNF-alpha), accelerating the maturation of dendritic cells into efficient antigen-presenting cells for T-lymphocytes (e.g., GM-CSF, IL-1 and IL-4) (U.S. Pat. No. 5,849,589, specifically incorporated herein by reference in its entirety) and acting as immunoadjuvants (e.g., IL-12) (Gabrilovich D I, et al., J Immunother Emphasis Tumor Immunol. 1996 (6):414-418). In some embodiments, an adjuvant comprises a CpG immunostimulatory oligonucleotide. In some embodiments, an adjuvant comprises a TLR agonist.

[0403] Other examples of useful adjuvants include, but are not limited to, chemically modified CpGs (e.g. CpR, Idera), Poly(I:C)(e.g. polyi:CI2U), non-CpG bacterial DNA or RNA as well as immunoactive small molecules and antibodies such as cyclophosphamide, sunitinib, bevacizumab, celebrex, NCX-4016, sildenafil, tadalafil, vardenafil, sorafinib, XL-999, CP-547632, pazopanib, ZD2171, AZD2171, ipilimumab, tremelimumab, and SC58175, which may act therapeutically and/or as an adjuvant. The amounts and concentrations of adjuvants and additives can readily be determined by the skilled artisan without undue experimentation. Additional adjuvants include colony-stimulating factors, such as Granulocyte Macrophage Colony Stimulating Factor (GM-CSF, sargramostim).

[0404] In some embodiments, a vaccine composition comprises more than one different adjuvant. In some embodiments, a vaccine composition comprises any adjuvant substance including any of the above or combinations thereof. It is also contemplated that a vaccine and an adjuvant can be administered together or separately in any appropriate sequence.

[0405] In some embodiments, a carrier (or excipient) is present independently of an adjuvant. In some embodiments, the function of a carrier is to increase the molecular weight, increase activity or immunogenicity, to confer stability, to increase the biological activity, or to increase serum half-life. In some embodiments, a carrier aids presenting peptides to T-cells. In some embodiments, a carrier comprises any suitable carrier known to the person skilled in the art, for example a protein or an antigen presenting cell. Examples of carrier proteins include, but are not limited to, keyhole limpet hemocyanin, serum proteins such as transferrin, bovine serum albumin, human serum albumin, thyroglobulin or ovalbumin, immunoglobulins, or hormones, such as insulin or palmitic acid. For immunization of humans, the carrier is generally a physiologically acceptable carrier acceptable to humans and safe. However, tetanus toxoid and/or diphtheria toxoid are suitable carriers. Alternatively, the carrier can be dextrans, for example sepharose.

[0406] In some embodiments, a vaccine comprises a viral vector-based vaccine platform, such as vaccinia, fowlpox, self-replicating alphavirus, marabavirus, adenovirus (See, e.g., Tatsis et al., Adenoviruses, Molecular Therapy (2004) 10, 616-629), or lentivirus, including but not limited to second, third or hybrid second/third generation lentivirus and recombinant lentivirus of any generation designed to target specific cell types or receptors (See, e.g., Hu et al., Immunization Delivered by Lentiviral Vectors for Cancer and Infectious Diseases, Immunol Rev. (2011) 239(1): 45-61, Sakuma et al., Lentiviral vectors: basic to translational, Biochem J. (2012) 443(3):603-18, Cooper et al., Rescue of splicing-mediated intron loss maximizes expression in lentiviral vectors containing the human ubiquitin C promoter, Nucl. Acids Res. (2015) 43 (1): 682-690, Zufferey et al., Self-Inactivating Lentivirus Vector for Safe and Efficient In Vivo Gene Delivery, J. Virol. (1998) 72 (12): 9873-9880). In general, upon introduction into a host, infected cells express the antigen or neoantigen and thereby elicits a host immune (e.g., CTL) response against the peptide(s).

[0407] Dependent on the packaging capacity of the above mentioned viral vector-based vaccine platforms, in some embodiments, the vaccine composition comprises one or more viral-vectors. In some embodiments, viral-vectors comprise sequences flanked by non-mutated sequences, separated by linkers, or preceded with one or more sequences targeting a subcellular compartment (See, e.g., Gros et al., Prospective identification of neoantigen-specific lymphocytes in the peripheral blood of melanoma patients, Nat Med (2016) 22 (4):433-8, Stronen et al., Targeting of cancer neoantigens with donor-derived T cell receptor repertoires, Science. (2016) 352 (6291):1337-41, Lu et al., Efficient identification of mutated cancer antigens recognized by T cells associated with durable tumor regressions, Clin Cancer Res. (2014) 20(13):3401-10). Vaccinia vectors and methods useful in immunization protocols are described in, e.g., U.S. Pat. No. 4,722,848. Another vector is BCG (Bacille Calmette Guerin). BCG vectors are described in Stover et al. (Nature 351:456-460 (1991)). A wide variety of other vaccine vectors useful for therapeutic administration or immunization of neoantigens, e.g., Salmonella typhi vectors, and the like will be apparent to those skilled in the art from the description herein.

[0408] In some embodiments, the heterodimeric Fc-fused protein therapy is combined with an oncolytic virus therapy. In general, an oncolytic virus is a virus engineered to infect and kill mainly cancer cells. In some embodiments, in addition to an oncolytic virus killing a cancer cell, the oncolytic virus induces an immune response to the cancer cell.

[0409] In certain embodiments, the heterodimeric Fc-fused protein therapy is combined with oncolytic virus therapy to treat a subject diagnosed with melanoma/skin-cancer. In certain embodiments, the oncolytic virus comprises talimogene laherparepvec (IMLYGIC®), also referred to as T-VEC. In some embodiments, a heterodimeric Fc-fused protein comprising subunits of IL-12 is used for treating cancer (e.g., an advanced malignancy) in combination with an oncolytic virus (for example, Talimogene Laherparepvec (IMLYGIC®) or T-VEC).

[0410] The description above describes multiple aspects and embodiments of the invention. The patent application specifically contemplates all combinations and permutations of the aspects and embodiments.

### EXAMPLES

[0411] The invention now being generally described, will be more readily understood by reference to the following examples, which are included merely for purposes of illustration of certain aspects and embodiments of the present invention, and is not intended to limit the invention.

### Example 1—Method of Preparation

[0412] The proteins of the present invention are typically made using recombinant DNA technology. In one exemplary embodiment, a first nucleic acid sequence encoding the first polypeptide comprising a first subunit of a multisubunit protein (p40 subunit of human IL-12) fused to a first antibody Fc domain polypeptide was cloned into a first expression vector (pET-pSURE-Puro); a second nucleic acid sequence encoding a second polypeptide comprising a second, different subunit of a multisubunit protein (p35 subunit of human IL-12) fused to a second antibody Fc domain polypeptide was cloned into a second expression vector (pET-pSURE-Puro); and the first and the second expression vectors were stably transfected together into host cells to produce the heterodimeric Fc-fused proteins.

[0413] Exemplary amino acid sequence encoded by the first expression vector is shown in SEQ ID NO:292. The first expression vector encoded a first polypeptide comprising a p40 subunit of human IL-12 fused to a human IgG1 Fc sequence comprising a Y349C mutation. The first polypeptide also included K360E and K409W mutations that promote heterodimerization, and LALAPA (L234A, L235A, and P329A) mutations that reduce effector functions. In SEQ ID NO:292, leader sequence is shown in italics, the p40 subunit sequence of human IL-12 is underlined, and the mutations are shown in bold.

(SEQ ID NO: 292)
MDMRVPAQLLGLLLLWLPGARCIWELKKDVYVVEL
DWYPDAPGEMVVLTCDTPEEDGITWTLDQSSEVLG
SGKTLTIQVKEFGDAGQYTCHKGGEVLSHSLLLLH
KKEDGIWSTDILKDQKEPKNKTFLRCEAKNYSGRF
TCWWLTTISTDLTFSVKSSRGSSDPQGVTCGAATL
SAERVRGDNKEYEYSVECQEDSACPAAEESLPIEV
MVDAVHKLKYENYTSSFFIRDIIKPDPPKNLQLKP
LKNSRQVEVSWEYPDTWSTPHSYFSLTFCVQVQGK
SKREKKDRVFTDKTSATVICRKNASISVRAQDRYY
SSSWSEWASVPCSPKSSDKTHTCPPCPAPEAAGGP
SVFLFPPKPKDTLMISRTPEVTCVVVDVSHEDPEV
KFNWYVDGVEVHNAKTKPREEQYNSTYRVVSVLTV
LHQDWLNGKEYKCKVSNKALAAPIEKTISKAKGQP
REPQVCTLPPSRDELTENQVSLTCLVKGFYPSDIA
VEWESNGQPENNYKTTPPVLDSDGSFFLYSWLTVD
KSRWQQGNVFSCSVMHEALHNHYTQKSLSLSPG

[0414] Exemplary amino acid sequence encoded from the second expression vector is shown in SEQ ID NO:293. The second expression vector encoded a second polypeptide comprising a p35 subunit of human IL-12 fused to a human IgG1 Fc sequence comprising a S354C mutation. The second polypeptide also included Q347R, D399V, and F405T mutations that promote heterodimerization, and LALAPA (L234A, L235A, and P329A) mutations that reduce effector functions. In SEQ ID NO:293, leader sequence is shown in italics, the p35 subunit sequence of human IL-12 is underlined, and mutations are shown in bold.

(SEQ ID NO: 293)
MDMRVPAQLLGLLLLWLPGARCRNLPVATPDPGMF
PCLHHSQNLLRAVSNMLQKARQTLEFYPCTSEEID
HEDITKDKTSTVEACLPLELTKNESCLNSRETSFI
TNGSCLASRKTSFMMALCLSSIYEDLKMYQVEFKT
MNAKLLMDPKRQIFLDQNMLAVIDELMQALNFNSE
TVPQKSSLEEPDFYKTKIKLCILLHAFRIRAVTID
RVMSYLNASGGGGSGGGGSGGGGSEPKSSDKTHTC
PPCPAPEAAGGPSVFLFPPKPKDTLMISRTPEVTC
VVVDVSHEDPEVKFNWYVDGVEVHNAKTKPREEQY
NSTYRVVSVLTVLHQDWLNGKEYKCKVSNKALAAP
IEKTISKAKGQPREPRVYTLPPCRDELTKNQVSLT
CLVKGFYPSDIAVEWESNGQPENNYKTTPPVLVSD
GSFTLYSKLTVDKSRWQQGNVFSCSVMHEALHNHY
TQKSLSLSPG

[0415] To achieve the highest yield of the protein, different ratios of the first and second expression vectors are explored to determine the optimal ratio for transfection into the host cells. After transfection, single clones are isolated for cell bank generation using methods known in the art, such as limited dilution, ELISA, FACS, microscopy, or Clonepix.

[0416] Clones are cultured under conditions suitable for bio-reactor scale-up and maintained expression of the proteins. The proteins are isolated and purified using methods known in the art including centrifugation, depth filtration, cell lysis, homogenization, freeze-thawing, affinity purification, gel filtration, ion exchange chromatography, hydrophobic interaction exchange chromatography, and mixed-mode chromatography.

### Example 2—Tumor Suppression by IL-12 Fused with a Silent Fc Domain Polypeptide in a CT26 Tumor Model

[0417] This example describes relative abilities of two IL-12-Fc fusion constructs of recombinant murine IL-12 (rmIL-12) to control tumor progression in a mouse colon cancer model. The two IL-12-Fc fusion variants used in this example were mIL-12-Fc wildtype (DF-mIL-12-Fc wt), which includes wild-type murine IL-12 p40 and p35 subunits fused to the N-termini of wild-type murine IgG2a Fc domain polypeptides, and mIL-12-Fc silent (DF-mIL-12-Fc si), which includes wild-type murine IL-12 p40 and p35 subunits fused to the N-termini of murine IgG2a Fc domain polypeptides with mutations L234A, L235A, and P329G. The amino acid sequences of the proteins are shown below:

mIL-12-p40-mIgG2A-EW
(first chain of DF-mIL-12-Fc wt)
(SEQ ID NO: 286)
MWELEKDVYVVEVDWTPDAPGETVNLTCDTPEEDD
ITWTSDQRHGVIGSGKTLTITVKEFLDAGQYTCHK
GGETLSHSHLLLHKKENGIWSTEILKNFKNKTFLK
CEAPNYSGRFTCSWLVQRNMDLKFNIKSSSSSPDS
RAVTCGMASLSAEKVTLDQRDYEKYSVSCQEDVTC
PTAEETLPIELALEARQQNKYENYSTSFFIRDIIK
PDPPKNLQMKPLKNSQVEVSWEYPDSWSTPHSYFS
LKFFVRIQRKKEKMKETEEGCNQKGAFLVEKTSTE
VQCKGGNVCVQAQDRYYNSSCSKWACVPCRVRSPR
GPTIKPCPPCKCPAPNLLGGPSVFIFPPKIKDVLM
ISLSPIVTCVVVDVSEDDPDVQISWFVNNVEVHTA
QTQTHREDYNSTLRVVSALPIQHQDWMSGKEFKCK
VNNKDLPAPIERTISKPKGSVRAPQVYVLPPPEEE
MTEKQVTLTCMVTDFMPEDIYVEWTNNGKTELNYK
NTEPVLDSDGSYFMYSWLRVEKKNWVERNSYSCSV
VHEGLHNHHTTKSFSRTPG
mIL-12-p35-mIgG2A-RVT
(second chain of DF-mIL-12-Fc wt)
(SEQ ID NO: 287)
RVIPVSGPARCLSQSRNLLKTTDDMVKTAREKLKH
YSCTAEDIDHEDITRDQTSTLKTCLPLELHKNESC
LATRETSSTTRGSCLPPQKTSLMMTLCLGSIYEDL
KMYQTEFQAINAALQNHNHQQIILDKGMLVAIDEL
MQSLNHNGETLRQKPPVGEADPYRVKMKLCILLHA
FSTRVVTINRVMGYLSSAGGGGSGGGGSGGGGSPR
GPTIKPCPPCKCPAPNLLGGPSVFIFPPKIKDVLM
ISLSPIVTCVVVDVSEDDPDVQISWFVNNVEVHTA
QTQTHREDYNSTLRVVSALPIQHQDWMSGKEFKCK
VNNKDLPAPIERTISKPKGSVRAPRVYVLPPPEEE
MTKKQVTLTCMVTDFMPEDIYVEWTNNGKTELNYK
NTEPVLVSDGSYTMYSKLRVEKKNWVERNSYSCSV
VHEGLHNHHTTKSFSRTPG
mIL-12-p40-mIgG2A-EW-LALAPG
(first chain of DF-mIL-12-Fc si)
(SEQ ID NO: 288)
MWELEKDVYVVEVDWTPDAPGETVNLTCDTPEEDD
ITWTSDQRHGVIGSGKTLTITVKEFLDAGQYTCHK
GGETLSHSHLLLHKKENGIWSTEILKNFKNKTFLK
CEAPNYSGRFTCSWLVQRNMDLKFNIKSSSSSPDS
RAVTCGMASLSAEKVTLDQRDYEKYSVSCQEDVTC
PTAEETLPIELALEARQQNKYENYSTSFFIRDIIK
PDPPKNLQMKPLKNSQVEVSWEYPDSWSTPHSYFS
LKFFVRIQRKKEKMKETEEGCNQKGAFLVEKTSTE
VQCKGGNVCVQAQDRYYNSSCSKWACVPCRVRSPR
GPTIKPCPPCKCPAPNAAGGPSVFIFPPKIKDVLM
ISLSPIVTCVVVDVSEDDPDVQISWFVNNVEVHTA
QTQTHREDYNSTLRVVSALPIQHQDWMSGKEFKCK
VNNKDLGAPIERTISKPKGSVRAPQVYVLPPPEEE
MTEKQVTLTCMVTDFMPEDIYVEWTNNGKTELNYK
NTEPVLDSDGSYFMYSWLRVEKKNWVERNSYSCSV
VHEGLHNHHTTKSFSRTPG
mIL-12-p35-mIgG2A-RVT-LALAPG
(second chain of DF-mIL-12-Fc si)
(SEQ ID NO: 289)
RVIPVSGPARCLSQSRNLLKTTDDMVKTAREKLKH
YSCTAEDIDHEDITRDQTSTLKTCLPLELHKNESC
LATRETSSTTRGSCLPPQKTSLMMTLCLGSIYEDL
KMYQTEFQAINAALQNHNHQQIILDKGMLVAIDEL
MQSLNHNGETLRQKPPVGEADPYRVKMKLCILLHA
FSTRVVTINRVMGYLSSAGGGGSGGGGSGGGGSPR
GPTIKPCPPCKCPAPNAAGGPSVFIFPPKIKDVLM
ISLSPIVTCVVVDVSEDDPDVQISWFVNNVEVHTA
QTQTHREDYNSTLRVVSALPIQHQDWMSGKEFKCK
VNNKDLGAPIERTISKPKGSVRAPRVYVLPPPEEE
MTKKQVTLTCMVTDFMPEDIYVEWTNNGKTELNYK
NTEPVLVSDGSYTMYSKLRVEKKNWVERNSYSCSV
VHEGLHNHHTTKSFSRTPG

[0418] Briefly, 10⁶ CT26-Tyrpl colon carcinoma cells were injected subcutaneously into the flank of Balb/c mice. On Day 14 after tumor inoculation, when tumor volume reached 270 mm³, the mice were randomized into different treatment groups (n=10 per group) and treated intraperitoneally with 1 μg of rmIL-12, DF-mIL-12-Fc wt at a molar dose equivalent to 1 μg rmIL-12, DF-mIL-12-Fc si at a molar dose equivalent to 1 μg rmIL-12, or 1 μg of mIgG2a isotype control once a week. Tumor growth was assessed for 60 days.

[0419] As shown in FIGS. 5A-5C, although IL-12 (FIG. 5A) and DF-mIL-12-Fc wt (FIG. 5B) were efficient in controlling tumor progression in some mice, only DF-mIL-12-Fc si induced robust tumor regression and yielded 100% complete tumor regression (FIG. 5C). Moreover, overall survival was significantly extended by the treatment of DF-mIL-12-Fc si therapy—100% of treated mice were still alive at day 60, whereas median survival times of the mice treated with isotype control, DF-mIL-12-Fc wt, and IL-12 were 27 days, 33 days, and 46 days, respectively (FIG. 6).

[0420] Next, different doses of DF-mIL-12-Fc wt and DF-mIL-12-Fc si in controlling tumor progression were compared. Briefly, 10⁶ CT26-Tyrpl colon carcinoma cells were injected subcutaneously into the flank of Balb/c mice. On Day 14 after tumor inoculation, when tumor volume reached 300 mm³, the mice were randomized into different treatment groups (n=10 per group) and treated intraperitoneally with DF-mIL-12-Fc wt at molar doses equivalent to 1 μg or 0.1 μg rmIL-12, or DF-mIL-12-Fc si at molar doses equivalent to 1 μg or 0.1 μg IL-12 once a week. Tumor growth was assessed for 55 days.

[0421] As shown in FIGS. 7A-7D, treatment with DF-mIL-12-Fc wt led to reduced tumor progression in some mice and complete regression in two mice at the 1 μg rmIL-12 molar equivalents dose (FIG. 7A), but no tumor suppression was observed at the 0.1 μg IL-12 molar equivalents dose (FIG. 7C). By contrast, the DF-mIL-12-Fc si treatment at the 1 μg IL-12 molar equivalents dose yielded 100% complete tumor regression (FIG. 7B) and induced a robust delay in tumor growth at the lower dose of 0.1 μg IL-12 molar equivalents (FIG. 7D). The median survival of the mice treated with 1 μg IL-12 molar equivalents of DF-mIL-12-Fc wt was 32 days, similar to the 34 days of median survival of the mice treated with 0.1 μg IL-12 molar equivalents of DF-mIL-12-Fc si, suggesting that DF-mIL-12-Fc si was 10-fold more potent than its wildtype variant (FIG. 8). DF-mIL-12-Fc wt was not efficient at the dose of 0.1 μg IL-12 molar equivalents, and showed the same median survival of 24 days as the isotype treated group.

[0422] Next, in vivo efficacy for different routes of administering DF-mIL-12-Fc si were compared. Briefly, 10⁶ CT26-Tyrpl colon carcinoma cells were injected subcutaneously into the flank of Balb/c mice. On Day 14 after tumor inoculation, when tumor volume reached 270 mm³, the mice were randomized into different treatment groups (n=10 per group) and treated either intraperitoneally or subcutaneously with DF-mIL-12-Fc si at a molar dose equivalent to 1 μg IL-12 or molar equivalent of mIgG2a isotype control once a week. Tumor growth was assessed for over 60 days.

[0423] As shown in FIGS. 22A-22B, both intraperitoneal (FIG. 22A) and subcutaneous (FIG. 22B) administration of DF-mIL-12-Fc si induced robust tumor regression and yielded 100% complete tumor regression. Thus, DF-mIL-12-Fc si treatment demonstrated efficacy using various routes of administration.

### Example 3—Tumor Suppression by IL-12 Fused with a Silent Fc Domain Polypeptide in a B16F10 Tumor Model

[0424] This example describes relative abilities of DF-mIL-12-Fc wt and DF-mIL-12-Fc si in controlling tumor progression in a mouse melanoma model. Briefly, 10⁶ B16F10 melanoma cells were injected subcutaneously into C57BL/6 mice. On Day 8 after tumor inoculation, when tumor volume reached 250 mm³, the mice were randomized into different treatment groups (n=10) and treated with 0.5 μg of IL-12, DF-mIL-12-Fc wt at a molar dose equivalent to 0.5 μg IL-12, DF-mIL-12-Fc si at a molar dose equivalent to 0.5 μg IL-12, or 0.5 μg of mIgG2a isotype control once a week. Tumor growth was assessed for 32 days.

[0425] As shown in FIGS. 9A-9C, although each of the IL-12-Fc constructs tested delayed tumor progression, DF-mIL-12-Fc si was the most efficient in controlling tumor growth. Median survival time of the mice treated with DF-mIL-12-Fc si was 29 days, which was longer than the median survival times of the mice treated with isotype control, DF-mIL-12-Fc wt, and IL-12, which were 16 days, 26 days, and 22 days, respectively (FIG. 10).

[0426] Next, different doses of DF-mIL-12-Fc wt and DF-mIL-12-Fc si in controlling tumor progression were compared. Briefly, 10⁶ B16F10 melanoma cells were injected subcutaneously into the flank of C57BL/6 mice. On Day 8 after tumor inoculation, the mice were randomized into different treatment groups (n=10 per group) and treated intraperitoneally with 0.5 μg or 0.1 μg IL-12 molar equivalents of DF-mIL-12-Fc wt, or 0.5 μg or 0.1 μg IL-12 molar equivalents of DF-mIL-12-Fc si once a week. Tumor growth was assessed for 30 days.

[0427] As shown in FIGS. 11A-11D, DF-mIL-12-Fc si was superior to DF-mIL-12-Fc wt in suppression of tumor growth at both doses. Moreover, at each dose, the median survival of the mice treated with DF-mIL-12-Fc wt was 20 days. By contrast, the median survival of the mice treated with 0.1 μg IL-12 molar equivalents of DF-mIL-12-Fc si was 21 days, and the median survival of the mice treated with 0.5 μg IL-12 molar equivalents of DF-mIL-12-Fc si was 28 days (FIG. 12). These results demonstrated that a high dose (0.5 μg IL-12 molar equivalents) of DF-mIL-12-Fc si significantly increased the survival of mice compared to its wildtype counterpart or isotype control.

[0428] Next, single dose administrations of the DF-mIL-12-Fc si treatment was compared to the weekly treatments previously described. Briefly, 10⁶ B16F10 melanoma cells were injected subcutaneously into C57BL/6 mice. On Day 8 after tumor inoculation, when tumor volume reached 200 mm³, the mice were randomized into different treatment groups (n=10) and treated with DF-mIL-12-Fc si at a molar dose equivalent to 0.5 μg IL-12 or molar equivalent of mIgG2a isotype control once a week. Tumor growth was assessed for 39 days.

[0429] As shown in FIG. 23, a single administration of DF-mIL-12-Fc si resulted in reduced tumor outgrowth in 100% of mice, although tumor outgrowth occurred sooner when compared to weekly administrations (FIG. 9C). Additionally, mice demonstrated transient weight loss, but after the first dose only (data not shown). Accordingly, a single administration of DF-mIL-12-Fc si demonstrated initial efficacy in a hard-to-treat tumor model, although subsequent weekly administrations are better at delaying tumor outgrowth in this model.

[0430] Next, in vivo efficacy for different routes of administering DF-mIL-12-Fc si were compared. Briefly, 10⁶ B16F10 melanoma cells were injected subcutaneously into C57BL/6 mice. On Day 7 after tumor inoculation, when tumor volume reached 260 mm³, the mice were randomized into different treatment groups (n=10) and treated either intraperitoneally or subcutaneously with DF-mIL-12-Fc si at a molar dose equivalent to 1 μg IL-12 or molar equivalent of mIgG2a isotype control once a week. Tumor growth was assessed for 40 days.

[0431] As shown in FIGS. 24A-24B, both intraperitoneal (FIG. 24A) and subcutaneous (FIG. 24B) administration of DF-mIL-12-Fc si induced tumor regression in 100% of mice. Thus, DF-mIL-12-Fc si treatment demonstrated efficacy using various routes of administration.

### Example 4—In Vitro Potency of DF-hIL-12-Fc Wt and rhlL-12

[0432] The potency of DF-hIL-12-Fc si in comparison to rhIL-12 was assessed using in vitro bioassays.

[0433] IL-12 potency was assessed using a HEK-Blue IL-12 reporter assay. IL-12R+ HEK-Blue reporter cells (InvivoGen) were harvested from culture and adjusted to 1×10⁶ cells/mL in culture media. DF-hIL-12-Fc si (DF IL-12-Fc) and recombinant human IL-12 (rhIL-12; PeproTech) were diluted in media. 100 μL of PBMC suspension was mixed with 100 μL of diluted test article and incubated for 48 hours. The supernatant was harvested and engagement of IL-12 receptor and signaling components stably expressed by the reporter cells was detected by measurement of secreted embryonic alkaline phosphatase from the cells following manufacturer instructions. Briefly, 25 μl of sample supernatant was mixed with 200 μL of QUANTI-Blue reagent and incubated in the dark at RT for 10 minutes. The plate was then read with a SpectraMax i3x plate-reader at 620 nM and optical density reported to represent relative IL-12 activity.

[0434] As shown in FIG. 13A, production of SEAP by IL-12R+ HEK reporter cells increased with increasing concentrations of DF-hIL-12-Fc si or rhIL-12. The measured IL-12 responses in the HEK-Blue reporter assay were comparable between DF-hIL-12-Fc si and rhIL-12 at the concentrations examined.

[0435] Next, IL-12 potency was assessed by quantifying IFNγ production from human PBMCs. PBMCs were isolated from human peripheral blood buffy coats using density gradient centrifugation and adjusted to 1×10⁶ cells/mL in culture media. DF-hIL-12-Fc si and recombinant human IL-12 (rhIL-12) were diluted in media. 100 μL of PBMC suspension was mixed with 100 μL of diluted test article and incubated for 48 hrs. The supernatant was harvested and IFNγ was quantified using a Human IFN-γ ELISA MAX kit (BioLegend). After development of the IFNγ ELISA plates, they were read using a SpectraMax i3x instrument at 450 nm with a background subtraction at 540 nm. IFNγ content in sample wells was approximated by interpolating sample readings from the assay standard curve.

[0436] As shown in FIG. 13B, IFNγ production increased when human PBMCs were cultured with DF-hIL-12-Fc si or rhIL-12, with concurrent treatment with 5 μg/ml of PHA to amplify the magnitude of IFNγ responses. IFN-γ production following IL-12 stimulation was comparable between DF-hIL-12-Fc si and rhIL-12 at the concentrations examined.

[0437] Accordingly, although the EC50 values with the two cell types and stimulation conditions differed by over an order of magnitude, comparable activity of DF-hIL-12-Fc si and rhIL-12 was demonstrated in both assays suggesting the potency of the DF-hIL-12-Fc si construct exhibits similar potency to that of native recombinant human IL-12.

### Example 5—IL-12, DF-hIL-12-Fc Si and IFNγ Concentrations in Monkey Plasma Following IV Infusion of DF-hIL-12-Fc Si or rhlL-12

[0438] The pharmacodynamics (PD) and pharmacokinetics (PK) were assessed in cynomolgus monkeys following IV infusion of DF-hIL-12-Fc si or rhIL-12.

[0439] Cynomolgus monkeys were administered DF-hIL-12-Fc si and recombinant human IL-12 at 10 μg/kg by IV-infusion.

[0440] An immunoassay was used to detect DF-hIL-12-Fc si and Human IL-12 based on a Quantikine ELISA Human IL-12 p70 Immunoassay kit: This assay employed the quantitative sandwich enzyme immunoassay technique. A monoclonal antibody specific for human IL-12 p70 was used as a solid phase capture and detection was accomplished using an antibody HRP-tagged reporter. Standards and QCs spiked with rhIL-12 or DF-hIL-12-Fc si reference standard, along with test samples were pipetted into the wells of microtiter plate and any IL-12 p70 present in the samples were bound by the immobilized antibody, on the solid phase. Unbound substances were washed away and the enzyme-linked polyclonal antibody specific for human IL-12 p70 was added to the wells. Unbound antibody-enzyme reagents were washed away and TMB substrate was added to each well. The resulting enzyme reaction yields a blue product that turns yellow when an acid stop solution is added. The intensity of the color measured in each well is directly proportional to the amount of rhIL-12 or DF-hIL-12-Fc si is bound in the initial step. Plates were read at 450 nm with a reference of 540 nm on a SpectraMax microplate reader with data collection software, SoftMax Pro Enterprise version 4.6. Data was converted into a text file and imported/processed in Watson LIMS v.7.2.0.02. Regression was performed using a Logistic (Auto Estimate) curve fitting with a weighting factor of 1.

[0441] An immunoassay (meso scale discovery (MSD)—an ELISA like immunoassay) was also used to detect DF-hIL-12-Fc si that involved coating an untreated MSD microtiter plate with monkey-adsorbed goat anti-human IgG and incubating at room temperature. The plate was washed, blocked, washed, and incubated with standard curve and quality control samples spiked with DF-hIL-12-Fc si reference standard, along with test samples. After this incubation, the plate was washed and biotin anti-human IL-12/IL-23 p40 was added to the plate as the primary detection antibody. After another wash step, streptavidin-conjugated Sulfo-Tag was added as the secondary detection antibody. The plate was washed a final time, MSD Read Buffer T was added to the plate, and the plate was read using a MSD Sector Imager 5600. Raw MSD data was exported into a text file, which was then converted into a Watson LIMS compatible file using a programmed Excel spreadsheet, which was custom designed at Envigo. Data was imported and regressed in Watson LIMS Software v.7.2.0.02.

[0442] A meso scale discovery method was performed for the relative quantitative measurement of NHP proinflammatory biomarkers in cynomolgus monkey plasma. The method used a sandwich immunoassay procedure for the relative quantitative measurement of Pro-inflammatory Panel 1 Biomarkers: IFNγ, IL-1β, IL-2, IL-6 IL-8, and IL-10 in cynomolgus monkey K2 EDTA plasma (referred to as monkey plasma). The method is based on MSD non-human primate (NHP) kits for V-PLEX and V-PLEX Plus, Catalog No. K15056D-1, K15056D-2, K15056D-4, K15056D-6, K15056G-1, K15056G-2, K15056G-4, K15056G-6. The method employs human capture and detection antibodies that react with cynomolgus monkeys. The kit provides plates pre-coated with capture antibodies on independent well-defined spots in each well of a 96-well multi-spot plate. The plate was incubated with monkey plasma samples, washed and then incubated with detection antibodies (specific for each analyte) that are conjugated with electrochemiluminescent (ECL) labels (MSD SULFO-TAG). Analytes in the sample bind to capture antibodies immobilized on the working electrode surface; recruitment of the detection antibodies by the bound analytes completes the sandwich. The plate was washed and an MSD Read Buffer was added to create the appropriate chemical environment for electrochemiluminiscence (ECL). The plate was loaded into an MSD Sector Imager 600 (SI600) instrument where a voltage was applied to the plate electrodes causing the captured labels to emit light. The instrument measures the intensity of emitted light in terms of Relative Light Units (RLU) to provide a relative quantitative measure of analytes in the sample. Raw RLU data was exported into a text file, which then was converted into a Watson LIMS compatible file using a programmed Excel spread sheet, which was custom designed at Envigo. Data was subsequently imported and regressed in Watson LIMS Software v.7.2.0.02.

[0443] FIG. 14 shows the relative plasma concentrations of DF-hIL-12-Fc si and recombinant human IL-12 over time following IV-administration. The data indicate that concentrations of DF-hIL-12-Fc si and rhIL-12 decreased over time, as expected. However, DF-hIL-12-Fc si demonstrated a prolonged half-life and overall greater exposure compared to rhIL-12 over the time course.

[0444] FIG. 14 also shows the relative concentrations of IFNγ (PD) in monkey plasma following IV-administration. The data indicate that the pharmacodynamics of DF-hIL-12-Fc si and rhIL-12, as assessed by IFNγ production, both demonstrated activity following IV-administration. However, DF-hIL-12-Fc si demonstrated a higher peak activity and a longer duration compared to rhIL-12.

### Example 6—Pharmacological Characterization of the Mouse Surrogate DF-mIL-12-Fc Si

[0445] The serum half-life and in vivo pharmacodynamics of a half-life prolonged murine IL-12 variant, designated DF-mIL-12-Fc si, was examined.

[0446] An equivalent molar amount of DF-mIL-12-Fc si, corresponding to 1 μg IL-12, was intravenously injected in non-tumor bearing Balb/c mice and PK/PD characteristics were compared to IL-12. Naïve Balb/c (n=6) were injected intravenously with 1 μg DF-mIL-12-Fc si and IL-12 (equivalent molar to 1 μg IL-12). Blood was sampled at 0.017, 0.5, 3, 6, 24, 48, 72, 96, 144 and 219 hours post-injection. IL-12 and IFNγ levels in serum were analyzed by ELISA, as previously described.

[0447] As shown in FIGS. 15A and 15B and quantified in Table 15, DF-mIL-12-Fc si showed protracted serum half-life of approximately 30 hours (FIG. 15B, DF-mIL-12-Fc si T_{1/2}=29.85 hours), which was 5 times longer than that of IL-12 (FIG. 15A; IL-12 T_{1/2}=6.05 hours). In addition to an extended half-life, DF-mIL-12-Fc si-mediated IFNγ production (AUC=916654) was also prolonged compared to IL-12 (AUC=20304).

[0448] Next, the PK/PD properties for different routes of administering DF-mIL-12-Fc si were compared. An equivalent molar amount of DF-mIL-12-Fc si, corresponding to 1 μg IL-12, was injected as a single dose in non-tumor bearing Balb/c mice by intravenous, intraperitoneal, or subcutaneous administration and PK/PD characteristics were assessed, as described.

[0449] As shown in FIGS. 15C-15E and quantified in Table 16, intravenous (FIG. 15C), intraperitoneal (FIG. 15D), or subcutaneous (FIG. 15E) administration all resulted in DF-mIL-12-Fc si-mediated IFNγ production comparable across the different routes of administration. Notably, subcutaneous administration resulted in a lower IL-12 Cmax. Accordingly, the pharmacokinetic properties (e.g., IL-12 concentration) of DF-mIL-12-Fc si administration varied depending on the route of administration, while the pharmacodynamic properties (IFNγ production) remained protracted and relatively comparable across the different routes.

TABLE 15
Pharmacological characteristics of
DF-mIL-12-Fc si and rmIL-12

| | IL-12 | | | | | IFNγ 10 |
|---|---|---|---|---|---|---|
| | T_{1/2} | Span | Tₘₐₓ | Cₘₐₓ | AUC | AUC |
| rmIL-12 | 6.05 | 9.15 | 0.13 | 358.65 | 999.81 | 20304 |
| DF-mIL- | 29.85 | 6.92 | 0.19 | 258.20 | 5636.49 | 916654 |
| 12-Fc | | | | | | |

TABLE 16
Pharmacological characteristics of DF-mIL-12-Fc si
via IV, IP, and SC

| | T1/2 | Span | Tmax | Cmax | AUC |
|---|---|---|---|---|---|
| Intravenous | 31.5 | 6.4 | 0.2 | 257.2 | 5985.6 |
| Intraperitoneal | 34.70 | 5.19 | N/A | 75.09 | 3964.21 |
| Subcutaneous | 37.5 | 4.1 | 36.0 | 23.1 | 1938.1 |

### Example 7—Combination of DF-mIL-12-Fc Si and PD-1 Blockade in B16F10 Mouse Model

[0450] Combination therapy of DF-mIL-12-Fc si and PD-1 blockade was performed to analyze whether anti-tumor immune response can be amplified in established B16F10 tumors.

[0451] C57BL/6 mice were injected with 10⁶ B16F10 melanoma cells subcutaneously into the flank of mice. On Day 8 after tumor inoculation, mice were randomized (n=10 per group). When average tumor volume reached ˜245 mm³, mice were treated intraperitoneally with 0.5 μg isotype control, 0.5 μg DF-mIL-12-Fc si, 200 μg anti-PD-1 clone RMP1-14, or combined DF-mIL-12-Fc si/anti-PD-1. Animals were injected once a week with DF-mIL-12-Fc si and twice weekly with anti-PD-1. Tumor growth was assessed for 60 days, and survival and body weight was monitored.

[0452] As shown in FIGS. 16A-16C, while administration of DF-mIL-12-Fc si alone delayed tumor regression (FIG. 16A) and PD-1 alone had a minimal effect on tumor growth (FIG. 16B), the combination of DF-mIL-12-Fc si with PD-1 blockade further delayed tumor growth (FIG. 16C), suggesting anti-PD-1 treatment further amplified anti-tumor responses to DF-mIL-12-Fc si treatment.

[0453] As shown in FIGS. 17A and 17B, overall survival with DF-mIL-12-Fc si therapy and in combination with PD-1 blockade was extended showing a median survival of 29 days (DF-mIL-12-Fc si monotherapy) and 36 days (combination) compared to 15 days of isotype and 17.5 days of 200 μg anti-PD-1 treated mice (FIG. 17A). Notably, despite the high response rate, the regimen of DF-mIL-12-Fc si and combination therapy appeared to be well tolerated by B16F10 tumor-bearing mice (FIG. 17B).

[0454] Accordingly, a combination therapy of DF-mIL-12-Fc si and PD-1 blockade demonstrated improved efficacy compared to either treatment alone.

### Example 8—Combination of DF-mIL-12-Fc Si and with mcFAE-C26.99 TriNKETs in B16F10 Mouse Model

[0455] Combination therapy of DF-mIL-12-Fc si and mcFAE-C26.99 TriNKETs was performed to analyze whether anti-tumor immune response can be amplified in established B16F10 tumors.

[0456] C57BL/6 mice were injected with 10⁶ B16F10 melanoma cells subcutaneously into the flank of the mice. On Day 7 after tumor inoculation mice were randomized (n=10 per group). When tumor average reached 200 mm³, mice were treated intraperitoneally with 150 μg isotype control, or 0.5 μg DF-mIL-12-Fc si, 150 μg TriNKET, or the combination DF-mIL-12-Fc si/TriNKET. Tumor growth was assessed for 60 days, and survival and body weight was monitored.

[0457] As shown in FIG. 18A, monotherapy with DF-mIL-12-Fc si led to reduced tumor growth. Treatment with mcFAE-C26.99 TriNKET as single agent at a starting tumor volume of 200 mm³ did not result in delayed tumor progression (FIG. 18B). In contrast, the combination of DF-mIL-12-Fc si with mcFAE-C26.99 further enhanced anti-tumor responses in comparison to DF-mIL-12-Fc si alone (FIG. 18C) and resulted in 30% complete responders (CR) (n=3), suggesting TriNKET treatment further amplified anti-tumor responses to DF-mIL-12-Fc si treatment.

[0458] As shown in FIG. 19A, overall survival with DF-mIL-12-Fc si therapy and in combination with mcFAE-C26.99 TriNKET was extended showing a median survival of 29 days (DF-mIL-12-Fc si monotherapy) and 60 days (TriNKET combination) compared to 16 days of isotype and 17 days of TriNKET treated mice. Notably, despite the high response rate, the regimen of DF-mIL-12-Fc si and combination therapy appeared to be well tolerated by B16F10 tumor-bearing mice (FIG. 19B).

[0459] The three complete responders (the CRs from the experiment described above and the data presented in FIG. 18C) were re-challenged with 2×10⁶ B16F10 melanoma cells 72 days after first tumor inoculation. Age-matched naïve C57BL/6 mice were used as control group. 1 out of 3 mice from the initial DF-mIL-12-Fc si/TriNKET combo treated group remained tumor-free, another mouse showed tumor formation starting at day 95 and the tumor progression of the third mouse was similar to the age-matched control group (FIG. 20), suggesting the formation of immunological memory with combination therapy.

[0460] Accordingly, a combination therapy of DF-mIL-12-Fc si and TriNKETs demonstrated improved efficacy compared to either treatment alone, including demonstrating a complete, durable response in a population of mice.

### Example 9—Treatment with DF-mIL-12-Fc Si Promotes Complete Recovery in CT26 Tumor Model

[0461] This example shows that treatment with DF-mIL-12-Fc si promotes recovery in mice bearing CT26 tumors.

[0462] Briefly, 10⁶ CT26-Tyrpl colon carcinoma cells were injected subcutaneously into the flank of Balb/c mice. On Day 14 after tumor inoculation, when tumor volume reached 270 mm³, the mice were randomized into different treatment groups and intraperitoneally injected with 1 μg of DF-mIL-12-Fc si at a molar dose equivalent to 1 μg rmIL-12 or 1 μg of mIgG2a isotype control once a week. Tumor growth was assessed for 60 days. The complete responders were re-challenged with 10⁶ CT26 cells 72 days after first tumor inoculation. Age-matched naïve Balb/C mice were used as control group.

[0463] FIG. 21A is a graph showing tumor growth curves of individual mice inoculated with CT26 tumor cells and administered a single dose of 1 μg of DF-mIL-12-Fc si or mIgG2a isotype. FIG. 21B is a graph showing body weights of individual mice inoculated with CT26 tumor cells and administered a weekly dose of 1 μg of DF-mIL-12-Fc si or mIgG2a isotype. FIG. 21C is a graph showing tumor growth curves of individual mice re-challenged with inoculation of CT26 tumor cells.

[0464] As shown in FIGS. 21A-B, administration of DF-mIL-12-Fc si resulted in robust tumor regression in comparison to mIgG2a isotype with no observable toxicity affecting the body weight of treatment animals. As shown in FIG. 21C, the initial DF-mIL-12-Fc si treated mice remained tumor-free suggesting the formation of immunological memory with DF-mIL-12-Fc si treatment.

### Example 10—DF mIL-12-Fc Si Delivered Intraperitoneally or Subcutaneously is Effective to Reduce Tumor Volume in CT26 Tumor Model

[0465] This example shows that intraperitoneal or subcutaneous administration of DF-mIL-12-Fc si ensures 100% complete recovery in mice bearing CT26 tumors.

[0466] Briefly, 10⁶ CT26-Tyrpl colon carcinoma cells were injected subcutaneously into the flank of Balb/c mice. On Day 14 after tumor inoculation, when tumor volume reached 270 mm³, the mice were randomized into different treatment groups and intraperitoneally injected with 1 μg of DF-mIL-12-Fc si at a molar dose equivalent to 1 μg IL-12 or 1 μg of mIgG2a isotype control once a week, or subcutaneously injected with 1 μg of DF-mIL-12-Fc si at a molar dose equivalent to 1 μg IL-12 or 1 μg of mIgG2a isotype control once a week. Tumor growth was assessed for more than 60 days.

[0467] FIG. 22A is a graph showing tumor growth curve of individual mice inoculated with CT26 tumor cells and administered a weekly dose of 1 μg of DF-mIL-12-Fc si or mIgG2a isotype delivered intraperitoneally. FIG. 22B is a graph showing tumor growth curve of individual mice inoculated with CT26 tumor cells and administered a weekly dose of 1 μg of DF-mIL-12-Fc si or mIgG2a isotype delivered subcutaneously.

[0468] As shown in FIGS. 22A-B, either intraperitoneal or subcutaneous delivery of DF-mIL-12-Fc si was effective at reducing CT26 tumor volume.

### Example 11—Single Dose Administration of DF-mIL-12-Fc Si is Effective to Reduce Tumor Volume in B16F10 Mouse Model

[0469] This example shows that a single dose of DF-mI12-Fc si is effective at reducing tumor volume in mice bearing B16F10 melanoma tumors.

[0470] In brief, C57BL/6 mice were injected with 10⁶ B16F10 melanoma cells subcutaneously into the flank of the mice. On Day 7 after tumor inoculation mice were randomized. When tumor average reached 200 mm³, mice were treated intraperitoneally with a single dose of isotype control, or 1 μg of DF-mIL-12-Fc si. Tumor growth was assessed for 50 days.

[0471] As shown in FIG. 23, a single administration of μg of DF-mIL-12-Fc si is effective to reduce tumor volume in B16F10 tumor-bearing mice.

### Example 12—DF-mIL-12-Fc Si Delivered Intraperitoneally or Subcutaneously is Effective to Reduce Tumor Volume in B16F10 Mouse Model

[0472] This example shows that intraperitoneal or subcutaneous administration of DF-mIL-12-Fc si led to 100% complete recovery in mice bearing B16F10 melanoma tumors.

[0473] Briefly, 10⁶ B16F10 melanoma cells were injected subcutaneously into the flank of C57BL/6 mice. On Day 7 after tumor inoculation, mice were randomized. When tumor average reached 200 mm³, mice were intraperitoneally injected with 1 μg of DF-mIL-12-Fc si at a molar dose equivalent to 1 μg IL-12 or 1 μg of mIgG2a isotype control once a week, or subcutaneously injected with 1 μg of DF-mIL-12-Fc si at a molar dose equivalent to 1 μg IL-12 or 1 μg of mIgG2a isotype control once a week. Tumor growth was assessed for 40 days.

[0474] As shown in FIGS. 24A-B, either intraperitoneal or subcutaneous delivery of DF-mIL-12-Fc si was effective at reducing B16F10 tumor volume as compared to isotype control.

### Example 13—DF-mIL-12-Fc Si is Efficacious as a Single Dose

[0475] This example shows that DF-mIL-12-Fc si is effective at reducing CT26 tumor volume when administered as a single dose, and when administered via repeat dosing, is even more effective.

[0476] Briefly, 10⁶ CT26-Tyrpl colon carcinoma cells were injected subcutaneously into the flank of Balb/c mice. On Day 14 after tumor inoculation, when tumor volume reached 270 mm³, the mice were randomized into different treatment groups (n=10 per group) and intraperitoneally injected with a single dose of 1 μg of DF-mIL-12-Fc si at a molar dose equivalent to 0.1 μg IL-12 or 1 μg of mIgG2a isotype control once a week. Alternatively, mice were intraperitoneally injected with 1 μg of DF-mIL-12-Fc si at a molar dose equivalent to 1 μg IL-12 or 1 μg of mIgG2a isotype control once a week. Tumor growth was assessed for more than 60 days.

[0477] FIG. 25A is a graph showing tumor growth curve of individual mice inoculated with CT26 tumor cells and administered a single dose of 1 μg of DF-mIL-12-Fc si or mIgG2a isotype. FIG. 25B is a graph showing tumor growth curve of individual mice inoculated with CT26 tumor cells and administered a weekly dose of 1 μg of DF-mIL-12-Fc si or mIgG2a isotype.

[0478] As shown in FIG. 21A and FIG. 25A, a single administration of 1 μg of DF-mIL-12-Fc si resulted in robust 70% complete recovery of tumor-bearing mice as compared to mIgG2a isotype. However, as shown in FIG. 5C and FIG. 25B, repeat weekly dosing of 1 μg of DF-mIL-12-Fc si ensured 100% complete recovery of tumor-bearing mice as compared to mIgG2a isotype. As shown in FIG. 21B, even repeat administration of DF-mIL-12-Fc si was well-tolerated with no toxicities observed, as assessed by body weight.

[0479] Additionally, complete responders (CR) were re-challenged with 5×10⁵ CT26-Tyrpl colon carcinoma cells at the opposite flank and tumor progression was compared to naïve mice challenged at the same tumor dose. As shown in FIG. 21C, while tumors grew in naïve mice, 100% of complete responders remained tumor-free following re-challenge. Accordingly, a single administration of DF-mIL-12-Fc si demonstrated a complete, durable response in a population of mice.

### Example 14—Pharmacokinetics in Cynomolgus Monkeys Treated with a Single Subcutaneous Dose of DF-hIL-12-Fc Si

[0480] Pharmacokinetics were determined following a subcutaneous injection of DF-hIL-12-Fc si at 1 μg/kg (FIG. 28A), 2 μg/kg (FIG. 28B), or 4 μg/kg (FIG. 28C) in cynomolgus monkeys utilizing an ELISA like immunoassay-Meso Scale Discovery (MSD) immunoassay method. Briefly, an untreated MSD microtiter plate was coated with monkey-adsorbed goat anti-human IgG and incubated at room temperature. Following coating and incubation, the plate was washed, blocked, washed, and incubated with standard curve and quality control samples spiked with a DF-hIL-12-Fc si reference standard, along with test samples. Following incubation, the plate was washed and biotin anti-human IL-12/IL-23 p40 was added to the plate as the primary detection antibody. Following another wash step, streptavidin-conjugated Sulfo-Tag was added as the secondary detection antibody. The plate was washed a final time before adding MSD read buffer T to the plate. The plate was read using an MSD Sector Imager 56000.

[0481] FIGS. 28A-28C are line graphs showing pharmacokinetics in cynomolgus monkeys treated with a single subcutaneous dose of 1 μg/kg (FIG. 28A), 2 μg/kg (FIG. 28B), or 4 μg/kg (FIG. 28C) of DF-hIL-12-Fc si.

[0482] The data indicate that concentrations of DF-hIL-12-Fc si and rhIL-12 decreased over time, as expected, with similar pharmacokinetic profiles at all doses tested.

### Example 15—Cytokine Release in Cynomolgus Monkeys Treated with a Single Subcutaneous Dose of DF-hIL-12-Fc Si

[0483] Quantitative measurements of cytokines following a subcutaneous injection of DF-hIL-12-Fc si at 1 μg/kg (FIGS. 29A and 29B), 2 μg/kg (FIGS. 29C and 29D), or 4 μg/kg (FIGS. 29E and 29F) in cynomolgus monkeys were determined using MSD immunoassay kits. The method used sandwich immunoassay kits (Pro-inflammatory Panel 1 Biomarkers and V-PLEX Plus Chemokine Panel 1 NHP Kit) for the relative quantitative measurement of Pro-inflammatory Panel 1 Biomarkers: IFNγ, IL-1β, IL-2, IL-6 IL-8, and IL-10 in cynomolgus monkey K2 EDTA plasma (referred to as monkey plasma). The method is based on MSD non-human primate (NHP) kits for V-PLEX and V-PLEX Plus, Catalog No. K15056D-1, K15056D-2, K15056D-4, K15056D-6, K15056G-1, K15056G-2, K15056G-4, K15056G-6. The method employs human capture and detection antibodies that react with cynomolgus monkeys. The kit provides plates pre-coated with capture antibodies on independent, well-defined spots within each well of a 96-well multi-spot plate. The plate was incubated with monkey plasma samples, washed and then incubated with detection antibodies (specific for each analyte) that are conjugated with electrochemiluminescent (ECL) labels (MSD SULFO-TAG). Analytes in the sample bind to capture antibodies immobilized on the working electrode surface; recruitment of the detection antibodies by the bound analytes completes the sandwich. The plate was washed and an MSD Read Buffer was added to create the appropriate chemical environment for electrochemiluminiscence (ECL). The plate was loaded into an MSD Sector Imager 600 (SI600) instrument where a voltage was applied to the plate electrodes causing the captured labels to emit light. The instrument measures the intensity of emitted light in terms of Relative Light Units (RLU) to provide a relative quantitative measure of analytes in the sample. Raw RLU data was exported into a text file, which then was converted into a Watson LIMS compatible file using a programmed Excel spread sheet, which was custom designed at Envigo. Data was subsequently imported and regressed in Watson LIMS Software v.7.2.0.02.

[0484] FIGS. 29A-29F are line graphs showing concentrations of IFNγ (FIGS. 29A, 29C, and 29E) and IP10/CXCL10 (FIGS. 29B, 29D, and 29F) in cynomolgus monkeys treated with a single subcutaneous dose of 1 μg/kg (FIGS. 29A and 29B), 2 μg/kg (FIGS. 29C and 29D), or 4 μg/kg (FIGS. 29E and 29F) of DF-hIL-12-Fc si.

[0485] As shown in FIG. 29A, a single subcutaneous dose of DF-hIL-12-Fc si at 1 μg/kg did not result in detectable levels of IFNγ. Subcutaneous doses of DF-hIL-12-Fc si at 2 μg/kg and 4 μg/kg, resulted in an increase in IFNγ levels in some animals that peaked at day 4 post-dosing (FIGS. 29C and 29E). Subcutaneous doses of DF-hIL-12-Fc si at 1 μg/kg, 2 μg/kg, and 4 μg/kg all resulted in elevated IP10/CXCL10 levels that peaked at day 4 post-dosing (FIGS. 29B, 29D, and 29F).

### Example 16—DF-mIL-12-Fc Si Combination Therapy Using Radiation or Chemotherapy in 4T1 Orthotopic Mouse Model

[0486] In order to show whether anti-tumor activity elicited by administration of DF-mIL-12-Fc si can be amplified, combination studies using radiation or chemotherapy were performed. Briefly, Balb/c mice were injected orthotopically into the mammary fat pad with 5×10⁵ 4T1-luc tumor cells. On Day 14 after tumor inoculation, mice were randomized (n=10 per group). Mice were treated subcutaneously with either isotype, DF-mIL-12-Fc si (both equimolar to 1 μg IL-12), 5 mg/kg Doxil® (chemotherapy) intravenously, or irradiated with 10 Gy as monotherapy, or DF-mIL-12-Fc si in combination with Doxil® or radiation. Tumor growth was assessed over time. FIG. 30 is a graph showing tumor growth curves of individual mice inoculated with breast cancer cells and administered a weekly dose of isotype control, DF-mIL-12-Fc si, Doxil (chemotherapy), or irradiated with 10 Gy as monotherapy or DF-mIL-12-Fc si in combination with Doxil® or radiation. Graph shows group averages of tumor growth±standard error mean.

[0487] As seen in FIG. 30, although monotherapy with DF-mIL-12-Fc si was effective by itself in 4T1 tumor-bearing mice, combination therapy amplified anti-tumor immune responses leading to full tumor regression in 10-30% of mice.

### Example 17—DF-mIL-12-Fc Si Mediated Anti-Tumor Efficacy Against Large, PD-1 Blockade-Resistant CT26 Colon Carcinoma Tumors

[0488] This example analyzes whether DF-mIL-12-Fc si elicited potent, anti-tumor responses against PD-1 blockade-resistant CT26-Tyrpl tumors. Briefly, Balb/c mice were injected with 0.5×10⁶ CT26-Tyrpl tumor cells. Following inoculation when average tumor volume reached ˜120 mm³, mice were randomized on Day 9. Mice were either treated with 200 μg isotype or anti-PD-1 antibody (twice weekly). FIG. 31A is a graph showing tumor growth curve of Balb/c mice inoculated with CT26-Tyrpl tumor cells and treated (bi-weekly) either with isotype control or anti-PD-1 antibody. On day 17, the group previously treated with anti-PD-1 (with an average tumor volume ˜800 mm³) was subdivided into two treatment groups. Group 1 continued to receive PD-1 blockade treatment twice weekly, Group 2 received PD-1 blockade (twice weekly) along with DF-mIL-12-Fc si (1 μg weekly). FIG. 31B is a graph showing tumor growth curve of the previously anti-PD-1 antibody-treated Balb/c mice treated with anti-PD-1 antibody (bi-weekly) along with weekly treatment with 1 μg of DF-mIL-12-Fc si.

[0489] As shown in FIG. 31A, anti-PD-1 monotherapy failed to control tumor progression. However, as shown in FIG. 31B, the addition of DF-mIL-12-Fc si resulted in effective tumor regression.

### Example 18—Local Treatment of DF-mIL-12-Fc Si Against Large CT26 Colon Carcinoma Tumors Induces Abscopal Anti-Tumor Responses

[0490] This example shows whether DF-mIL-12-Fc si treatment can induce abscopal therapeutic effects. Briefly, Balb/c were implanted subcutaneously with CT26-Tyrpl colon carcinoma cells on both the left (0.8×10⁶ tumor cells) and right (0.4×10⁶ tumor cells) flank. On Day 13 after tumor inoculation, left tumors were injected either with 0.1 μg isotype control or 0.1 μg DF-mIL-12-Fc si once weekly for 2-3 weeks. FIG. 32A is a graph showing tumor growth curve of the treated (Tr) tumor in Balb/c mice inoculated with CT26-Tyrpl tumor cells and treated once (weekly) with either isotype control or DF-mIL-12-Fc si. Right tumors were left untreated (NT).

[0491] FIG. 32B is a graph showing tumor growth curves of the untreated (NT) tumors in Balb/c mice inoculated with CT26-Tyrpl tumor cells.

[0492] As shown in FIGS. 32A-32B, control isotype-treated tumors grew progressively at both right and left sites. As shown in FIGS. 32A-32B, DF-mIL-12-Fc si caused effective anti-tumor responses at the local injected site (FIG. 32A) and the distant non-treated tumor (FIG. 32B) indicating abscopal therapeutic effects.

### Example 19—DF-mIL-12-Fc Si Mediated Anti-Tumor Efficacy Against Large CT26 Colon Carcinoma Tumors

[0493] This example shows that DF-mIL-12-Fc si which includes wild-type murine IL-12 p40 and p35 subunits fused to the N-termini of murine IgG2a Fc domain polypeptides with mutations L234A, L235A, and P329G (discussed in Example 2) is efficacious against larger tumor volumes.

[0494] DF-mIL-12-Fc si-mediated anti-tumor efficacy against large CT26 colon carcinoma tumors was tested. Briefly, Balb/c mice were injected subcutaneously with 10⁶ CT26-Tyrpl colon carcinoma cells. On Day 18 after tumor inoculation, when tumor volume reached 800 mm³, the mice were randomized into different treatment groups (n=10 per group) and treated intraperitoneally with DF-mIL-12-Fc si at a molar dose equivalent to 1 μg or 2 μg IL-12, or molar equivalent of mIgG2a isotype once or once weekly.

[0495] Tumor growth was assessed for 65 days. FIG. 26A is a graph showing tumor growth curves of Balb/c mice inoculated with CT26-Tyrpl tumor cells and treated once (weekly) with either 2 μg mIgG2a isotype control or 1 μg DF-mIL-12-Fc si. FIG. 26B is a graph showing tumor growth curves of Balb/c mice inoculated with CT26-Tyrpl tumor cells and treated once (weekly) with either 2 μg mIgG2a isotype control or 2 μg DF-mIL-12-Fc si. FIG. 33A is a graph showing tumor growth curves of Balb/c mice inoculated with CT26-Tyrpl tumor cells and treated once with either 2 μg mIgG2a isotype control or 2 μg DF-mIL-12-Fc si. FIG. 33B is a graph showing average tumor growth curves of Balb/c mice inoculated with CT26-Tyrpl tumor cells and treated with 2 μg mIgG2a isotype control, 1 μg DF-mIL-12-Fc si (weekly administration), 2 μg DF-mIL-12-Fc si (weekly administration), or 2 μg DF-mIL-12-Fc si (once). FIGS. 26A, 26B, and 33A show tumor growth curves of individual mice. FIG. 33B shows tumor average±standard error mean.

[0496] As shown in FIGS. 26A, 26B, and 33B, weekly doses (1 μg or 2 μg) of DF-mIL-12-Fc si were efficient in controlling tumor progression and 100% of mice responded to DF-mIL-12-Fc si treatment. Additionally, as shown in FIG. 33A, a single treatment with 2 μg DF-mIL-12-Fc si showed tumor regression yielding a 100% response rate. The data and figures described in this example show that DF-mIL-12-Fc si is not only effective at reducing larger CT26 tumor volume but also effective at reducing CT26 tumor volume when administered as a single dose.

### Example 20—DF-mIL-12-Fc Si Treatment Against B16F10 Melanomas Induces Production of Cytokines and Chemokines in Serum and in Tumors

[0497] This example shows that DF-mIL-12-Fc si treatment results in elevated levels of IFNγ, CXCL9, and CXCL10 in blood and tumors of C57BL/6 mice bearing B16F10 tumors. Briefly, C57BL/6 mice were injected subcutaneously with 10⁶ B16F10 melanoma cells. On Day 7 after tumor inoculation (when average tumor volume reached 150 mm³), mice were randomized (n=8 per group). Mice were treated intraperitoneally with isotype control, IL-12, or DF-mIL-12-Fc equimolar to 1 μg IL-12.

[0498] After 72 hours post-treatment, serum and tumor lysates were prepared and analyzed for IFNγ (FIG. 27A), CXCL9 (FIG. 27B), and CXCL10 (FIG. 27C) expression using multiplex technology. FIGS. 34A-C show average cytokine/chemokine levels in mice.

[0499] As shown in FIGS. 27A-27C, a single administration of 0.5 μg of DF-mIL-12-Fc si resulted in increased expression of IFNγ (FIG. 27A), CXCL9 (FIG. 27B), and CXCL10 (FIG. 27C) in serum (left panel) and within tumors (right panel), whereas IL-12 treatment had little or no effect.

### Example 21—DF hIL-12-Fc Si Having LALAPA and LALAPG Mutations have Similar IFNγ-Stimulating Activity and Abrogated FcγR Binding

[0500] This example shows the IFNγ-stimulating and FcγR-binding activities of DF hIL-12-Fc si with IgG1 Fc having LALAPA (L234A, L235A, and P329A) mutations, or LALAPG (L234A, L235A, and P329G) mutations. In brief, human PBMCs were cultured for 2 days with both 5 μg/ml phytohaemagglutinin (PHA) and a dose-titration of DF hIL-12-Fc-si, having LALAPA or LALAPG mutations. After 2-day stimulation, supernatants were harvested and IFNγ content measured by ELISA. For determining FcγR-binding activities, fluorophore-conjugated hIgG1 isotype antibody (83 nM) bound to THP-1 cells that express high affinity FcγRs CD32 and CD64 was detected by flow cytometry.

[0501] As shown in FIG. 34A, hIL-12-Fc-LALAPA and hIL-12-Fc-LALAPG have similar abilities to stimulate IFNγ production from PBMCs concurrently with PHA, well above the amount produced with PHA alone.

[0502] As shown in FIG. 34B, Simultaneous inclusion of 16-fold molar excess of hIL-12-Fc-wt (1.3 μM) in a mixture with the labeled hIgG1 isotype antibody resulted in substantial reduction of binding signal, likely due to competition for IgG1 binding to CD32 and CD64. In contrast, at the same concentration, neither incubation with hIL-12-Fc-LALAPA nor hIL-12-Fc-LALAPG resulted in detectable IgG1 isotype binding, suggesting abrogated FcγR engagement for both proteins attributable to the LALAPA and LALAPG mutations.

### NUMBERED EMBODIMENTS

[0503] Embodiments disclosed herein include embodiments P1 to P121 as provided in the numbered embodiments of the disclosure.

### Embodiment P1

[0504] A heterodimeric Fc-fused protein comprising:

[0505] a first polypeptide comprising a first antibody Fc sequence and a second polypeptide comprising a second, different antibody Fc sequence,

[0506] wherein the first polypeptide further comprises a protein sequence of a subunit of a multisubunit protein,

[0507] wherein the protein sequence is fused by a linker comprising amino acid sequence RVESKYGPPCPPCPAPEFXGG (SEQ ID NO:1) to the first antibody Fc sequence, wherein X represents L or E; and

[0508] an additional subunit of the multisubunit protein is fused to the second, different antibody Fc sequence, and the subunits of the multisubunit protein are bound to each other,

[0509] wherein the first antibody Fc sequence and the second, different antibody Fc sequence each comprise different mutations promoting heterodimerization,

[0510] wherein the first antibody Fc sequence and the second, different antibody Fc sequence are bound to each other.

### Embodiment P2

[0511] The heterodimeric Fc-fused protein of embodiment P1, wherein the linker comprises amino acid sequence RVESKYGPPCPPCPAPEFLGG (SEQ ID NO:2).

### Embodiment P3

[0512] The heterodimeric Fc-fused protein of embodiment P2, wherein the additional subunit of the multisubunit protein is fused to the second, different antibody Fc sequence by a linker comprising amino acid sequence GGGGSGGGGSGGGGSRVESKYGPPCPPCPAPEFLGG (SEQ ID NO:3).

### Embodiment P4

[0513] The heterodimeric Fc-fused protein of embodiment P3, wherein the additional subunit of the multisubunit protein is fused to the second, different antibody Fc sequence by a linker consisting of amino acid sequence GGGGSGGGGSGGGGSRVESKYGPPCPPCPAPEFLGG (SEQ ID NO:3).

### Embodiment P5

[0514] The heterodimeric Fc-fused protein of embodiment P2, wherein the additional subunit of the multisubunit protein is fused to the second, different antibody Fc sequence by a linker comprising amino acid sequence GGGGSRVESKYGPPCPPCPAPEFLGG (SEQ ID NO:13).

### Embodiment P6

[0515] The heterodimeric Fc-fused protein of embodiment P5, wherein the additional subunit of the multisubunit protein is fused to the second, different antibody Fc sequence by a linker consisting of amino acid sequence GGGGSRVESKYGPPCPPCPAPEFLGG (SEQ ID NO:13).

### Embodiment P7

[0516] The heterodimeric Fc-fused protein of embodiment P2, wherein the additional subunit of the multisubunit protein is fused to the second, different antibody Fc sequence by a linker comprising amino acid sequence GGGGSGGGGSRVESKYGPPCPPCPAPEFLGG (SEQ ID NO:14).

### Embodiment P8

[0517] The heterodimeric Fc-fused protein of embodiment P7, wherein the additional subunit of the multisubunit protein is fused to the second, different antibody Fc sequence by a linker consisting of amino acid sequence GGGGSGGGGSRVESKYGPPCPPCPAPEFLGG (SEQ ID NO:14).

### Embodiment P9

[0518] A heterodimeric Fc-fused protein according to any one of embodiments P2 to P8, wherein the linker fusing the protein sequence to the first antibody Fc sequence consists of amino acid sequence RVESKYGPPCPPCPAPEFLGG (SEQ ID NO:2).

### Embodiment P10

[0519] The heterodimeric Fc-fused protein of embodiment P1, wherein the linker comprises amino acid sequence RVESKYGPPCPPCPAPEFEGG (SEQ ID NO:4).

### Embodiment P11

[0520] The heterodimeric Fc-fused protein of embodiment P10, wherein the additional subunit of the multisubunit protein is fused to the second, different antibody Fc sequence by a linker comprising amino acid sequence GGGGSGGGGSGGGGSRVESKYGPPCPPCPAPEFEGG (SEQ ID NO:5).

### Embodiment P12

[0521] The heterodimeric Fc-fused protein of embodiment P11, wherein the additional subunit of the multisubunit protein is fused to the second, different antibody Fc sequence by a linker consisting of amino acid sequence GGGGSGGGGSGGGGSRVESKYGPPCPPCPAPEFEGG (SEQ ID NO:5).

### Embodiment P13

[0522] The heterodimeric Fc-fused protein of embodiment P10, wherein the additional subunit of the multisubunit protein is fused to the second, different antibody Fc sequence by a linker comprising amino acid sequence GGGGSRVESKYGPPCPPCPAPEFEGG (SEQ ID NO:63).

### Embodiment P14

[0523] The heterodimeric Fc-fused protein of embodiment P13, wherein the additional subunit of the multisubunit protein is fused to the second, different antibody Fc sequence by a linker consisting of amino acid sequence GGGGSRVESKYGPPCPPCPAPEFEGG (SEQ ID NO:63).

### Embodiment P15

[0524] The heterodimeric Fc-fused protein of embodiment P10, wherein the additional subunit of the multisubunit protein is fused to the second, different antibody Fc sequence by a linker comprising amino acid sequence GGGGSGGGGSRVESKYGPPCPPCPAPEFEGG (SEQ ID NO:64).

### Embodiment P16

[0525] The heterodimeric Fc-fused protein of embodiment P15, wherein the additional subunit of the multisubunit protein is fused to the second, different antibody Fc sequence by a linker consisting of amino acid sequence GGGGSGGGGSRVESKYGPPCPPCPAPEFEGG (SEQ ID NO:64).

### Embodiment P17

[0526] A heterodimeric Fc-fused protein according to any one of embodiments P10 to P16, wherein the linker fusing the protein sequence to the first antibody

[0527] Fc sequence consists of amino acid sequence RVESKYGPPCPPCPAPEFEGG (SEQ ID NO:4).

### Embodiment P18

[0528] A heterodimeric Fc-fused protein comprising:

[0529] a first polypeptide comprising a first antibody Fc sequence and a second polypeptide comprising a second, different antibody Fc sequence,

[0530] wherein the first polypeptide further comprises a protein sequence of a subunit of a multisubunit protein,

[0531] wherein the protein sequence is fused by a linker comprising amino acid sequence EPKSSDKTHTCPPCPAPEX₁X₂GX₃ (SEQ ID NO:6) or PKSSDKTHTCPPCPAPEX₁X₂GX₃ (SEQ ID NO:237) to the first antibody Fc sequence, wherein X₁ represents L or A, X₂ represents L, E, or A, and X₃ represents A or G; and

[0532] an additional subunit of the multisubunit protein is fused to the second, different antibody Fc sequence, and the subunits of the multisubunit protein are bound to each other, and

[0533] wherein when the X₁ represents L and/or X₂ represents L, at least one of the first antibody Fc sequence, and the second, different antibody Fc sequence comprises a Q347R mutation for promoting heterodimerization,

[0534] wherein the first antibody Fc sequence and the second, different antibody Fc sequence are bound to each other.

### Embodiment P19

[0535] The heterodimeric Fc-fused protein of embodiment P18, wherein the linker comprises amino acid sequence EPKSSDKTHTCPPCPAPELLGG (SEQ ID NO:7) or PKSSDKTHTCPPCPAPELLGG (SEQ ID NO:238).

### Embodiment P20

[0536] The heterodimeric Fc-fused protein of embodiment P19, wherein the additional subunit of the multisubunit protein is fused to the second, different antibody Fc sequence by a linker comprising amino acid sequence GGGGSGGGGSGGGGSEPKSSDKTHTCPPCPAPELLGG (SEQ ID NO:8) or GGGGSGGGGSGGGGSPKSSDKTHTCPPCPAPELLGG (SEQ ID NO:241).

### Embodiment P21

[0537] The heterodimeric Fc-fused protein of embodiment P20, wherein the additional subunit of the multisubunit protein is fused to the second, different antibody Fc sequence by a linker consisting of amino acid sequence GGGGSGGGGSGGGGSEPKSSDKTHTCPPCPAPELLGG (SEQ ID NO:8) or GGGGSGGGGSGGGGSPKSSDKTHTCPPCPAPELLGG (SEQ ID NO:241).

### Embodiment P22

[0538] The heterodimeric Fc-fused protein of embodiment P19, wherein the additional subunit of the multisubunit protein is fused to the second, different antibody Fc sequence by a linker comprising amino acid sequence GGGGSEPKSSDKTHTCPPCPAPELLGG (SEQ ID NO:15) or GGGGSPKSSDKTHTCPPCPAPELLGG (SEQ ID NO:242).

### Embodiment P23

[0539] The heterodimeric Fc-fused protein of embodiment P22, wherein the additional subunit of the multisubunit protein is fused to the second, different antibody Fc sequence by a linker consisting of amino acid sequence GGGGSEPKSSDKTHTCPPCPAPELLGG (SEQ ID NO:15) or GGGGSPKSSDKTHTCPPCPAPELLGG (SEQ ID NO:242).

### Embodiment P24

[0540] The heterodimeric Fc-fused protein of embodiment P19, wherein the additional subunit of the multisubunit protein is fused to the second, different antibody Fc sequence by a linker comprising amino acid sequence GGGGSGGGGSEPKSSDKTHTCPPCPAPELLGG (SEQ ID NO:16) or GGGGSGGGGSPKSSDKTHTCPPCPAPELLGG (SEQ ID NO:243).

### Embodiment P25

[0541] The heterodimeric Fc-fused protein of embodiment P24, wherein the additional subunit of the multisubunit protein is fused to the second, different antibody Fc sequence by a linker consisting of amino acid sequence GGGGSGGGGSEPKSSDKTHTCPPCPAPELLGG (SEQ ID NO:16) or GGGGSGGGGSPKSSDKTHTCPPCPAPELLGG (SEQ ID NO:243).

### Embodiment P26

[0542] A heterodimeric Fc-fused protein according to any one of embodiments P19 to P25, wherein the linker fusing the protein sequence to the first antibody Fc sequence consists of amino acid sequence EPKSSDKTHTCPPCPAPELLGG (SEQ ID NO:7) or PKSSDKTHTCPPCPAPELLGG (SEQ ID NO:238).

### Embodiment P27

[0543] The heterodimeric Fc-fused protein of embodiment P18, wherein the linker comprises amino acid sequence EPKSSDKTHTCPPCPAPEAAGG (SEQ ID NO:9) or PKSSDKTHTCPPCPAPEAAGG (SEQ ID NO:239).

### Embodiment P28

[0544] The heterodimeric Fc-fused protein of embodiment P27, wherein the additional subunit of the multisubunit protein is fused to the second, different antibody Fc sequence by a linker comprising amino acid sequence GGGGSGGGGSGGGGSEPKSSDKTHTCPPCPAPEAAGG (SEQ ID NO:10) or GGGGSGGGGSGGGGSPKSSDKTHTCPPCPAPEAAGG (SEQ ID NO:244).

### Embodiment P29

[0545] The heterodimeric Fc-fused protein of embodiment P28, wherein the additional subunit of the multisubunit protein is fused to the second, different antibody Fc sequence by a linker consisting of amino acid sequence GGGGSGGGGSGGGGSEPKSSDKTHTCPPCPAPEAAGG (SEQ ID NO:10) or GGGGSGGGGSGGGGSPKSSDKTHTCPPCPAPEAAGG (SEQ ID NO:244).

### Embodiment P30

[0546] The heterodimeric Fc-fused protein of embodiment P27, wherein the additional subunit of the multisubunit protein is fused to the second, different antibody Fc sequence by a linker comprising amino acid sequence GGGGSEPKSSDKTHTCPPCPAPEAAGG (SEQ ID NO:65) or GGGGSPKSSDKTHTCPPCPAPEAAGG (SEQ ID NO:245).

### Embodiment P31

[0547] The heterodimeric Fc-fused protein of embodiment P30, wherein the additional subunit of the multisubunit protein is fused to the second, different antibody Fc sequence by a linker consisting of amino acid sequence GGGGSEPKSSDKTHTCPPCPAPEAAGG (SEQ ID NO:65) or GGGGSPKSSDKTHTCPPCPAPEAAGG (SEQ ID NO:245).

### Embodiment P32

[0548] The heterodimeric Fc-fused protein of embodiment P27, wherein the additional subunit of the multisubunit protein is fused to the second, different antibody Fc sequence by a linker comprising amino acid sequence GGGGSGGGGSEPKSSDKTHTCPPCPAPEAAGG (SEQ ID NO:66) or GGGGSGGGGSPKSSDKTHTCPPCPAPEAAGG (SEQ ID NO:246).

### Embodiment P33

[0549] The heterodimeric Fc-fused protein of embodiment P32, wherein the additional subunit of the multisubunit protein is fused to the second, different antibody Fc sequence by a linker consisting of amino acid sequence GGGGSGGGGSEPKSSDKTHTCPPCPAPEAAGG (SEQ ID NO:66) or GGGGSGGGGSPKSSDKTHTCPPCPAPEAAGG (SEQ ID NO:246).

### Embodiment P34

[0550] A heterodimeric Fc-fused protein according to any one of embodiments P27 to P33, wherein the linker fusing the protein sequence to the first antibody Fc sequence consists of amino acid sequence EPKSSDKTHTCPPCPAPEAAGG (SEQ ID NO:9) or PKSSDKTHTCPPCPAPEAAGG (SEQ ID NO:239).

### Embodiment P35

[0551] The heterodimeric Fc-fused protein of embodiment P18, wherein the linker comprises amino acid sequence EPKSSDKTHTCPPCPAPEAEGA (SEQ ID NO:11) or PKSSDKTHTCPPCPAPEAEGA (SEQ ID NO:240).

### Embodiment P36

[0552] The heterodimeric Fc-fused protein of embodiment P35, wherein the additional subunit of the multisubunit protein is fused to the second, different antibody Fc sequence by a linker comprising amino acid sequence GGGGSGGGGSGGGGSEPKSSDKTHTCPPCPAPEAEGA (SEQ ID NO:12) or GGGGSGGGGSGGGGSPKSSDKTHTCPPCPAPEAEGA (SEQ ID NO:247).

### Embodiment P37

[0553] The heterodimeric Fc-fused protein of embodiment P36, wherein the additional subunit of the multisubunit protein is fused to the second, different antibody Fc sequence by a linker consisting of amino acid sequence GGGGSGGGGSGGGGSEPKSSDKTHTCPPCPAPEAEGA (SEQ ID NO:12) or GGGGSGGGGSGGGGSPKSSDKTHTCPPCPAPEAEGA (SEQ ID NO:247).

### Embodiment P38

[0554] The heterodimeric Fc-fused protein of embodiment P35, wherein the additional subunit of the multisubunit protein is fused to the second, different antibody Fc sequence by a linker comprising amino acid sequence GGGGSEPKSSDKTHTCPPCPAPEAEGA (SEQ ID NO:67) or GGGGSPKSSDKTHTCPPCPAPEAEGA (SEQ ID NO:248).

### Embodiment P39

[0555] The heterodimeric Fc-fused protein of embodiment P38, wherein the additional subunit of the multisubunit protein is fused to the second, different antibody Fc sequence by a linker consisting of amino acid sequence GGGGSEPKSSDKTHTCPPCPAPEAEGA (SEQ ID NO:67) or GGGGSPKSSDKTHTCPPCPAPEAEGA (SEQ ID NO:248).

### Embodiment P40

[0556] The heterodimeric Fc-fused protein of embodiment P35, wherein the additional subunit of the multisubunit protein is fused to the second, different antibody Fc sequence by a linker comprising amino acid sequence GGGGSGGGGSEPKSSDKTHTCPPCPAPEAEGA (SEQ ID NO:68) or GGGGSGGGGSPKSSDKTHTCPPCPAPEAEGA (SEQ ID NO:249).

### Embodiment P41

[0557] The heterodimeric Fc-fused protein of embodiment P40, wherein the additional subunit of the multisubunit protein is fused to the second, different antibody Fc sequence by a linker consisting of amino acid sequence GGGGSGGGGSEPKSSDKTHTCPPCPAPEAEGA (SEQ ID NO:68) or GGGGSGGGGSPKSSDKTHTCPPCPAPEAEGA (SEQ ID NO:249).

### Embodiment P42

[0558] A heterodimeric Fc-fused protein according to any one of embodiments P35 to P41, wherein the linker fusing the protein sequence to the first antibody Fc sequence consists of amino acid sequence EPKSSDKTHTCPPCPAPEAEGA (SEQ ID NO:11) or PKSSDKTHTCPPCPAPEAEGA (SEQ ID NO:240).

### Embodiment P43

[0559] A heterodimeric Fc-fused protein according to any one of embodiments P1 to P17, wherein the first antibody Fc sequence and the second, different antibody Fc sequence are IgG4 Fc sequences mutated to promote heterodimerization with each other.

### Embodiment P44

[0560] The heterodimeric Fc-fused protein of embodiment P43, wherein the first antibody Fc sequence comprises one or more mutation(s) selected from the group consisting of K370E, R409W, and a combination thereof, and the second, different antibody Fc sequence comprises one or more mutation(s) selected from the group consisting of E357N, D399V, F405T, and any combination(s) thereof.

### Embodiment P45

[0561] The heterodimeric Fc-fused protein of embodiment P43, wherein the first antibody Fc sequence comprises one or more mutation(s) selected from the group consisting of E357N, D399V, F405T, and any combination(s) thereof, and the second, different antibody Fc sequence comprises one or more mutation(s) selected from the group consisting of K370E, R409W, and a combination thereof.

### Embodiment P46

[0562] The heterodimeric Fc-fused protein of embodiment P43, wherein the first antibody Fc sequence comprises mutations K370E and R409W, and the second, different antibody Fc sequence comprises mutations E357N, D399V, and F405T.

### Embodiment P47

[0563] The heterodimeric Fc-fused protein of embodiment P43, wherein the first antibody Fc sequence comprises mutations E357N, D399V, and F405T, and the second, different antibody Fc sequence comprises mutations K370E and R409W.

### Embodiment P48

[0564] The heterodimeric Fc-fused protein of embodiment P43, wherein the first antibody Fc sequence comprises one or more mutation(s) selected from the group consisting of K360E, R409W, and a combination thereof, and the second, different antibody Fc sequence comprises one or more mutation(s) selected from the group consisting of Q347R, D399V, F405T, and any combination(s) thereof.

[0565] Embodiment P49 The heterodimeric Fc-fused protein of embodiment P43, wherein the first antibody Fc sequence comprises one or more mutation(s) selected from the group consisting of Q347R, D399V, F405T, and any combination(s) thereof, and the second, different antibody Fc sequence comprises one or more mutation(s) selected from the group consisting of K360E, R409W, and a combination thereof.

### Embodiment P50

[0566] The heterodimeric Fc-fused protein of embodiment P43, wherein the first antibody Fc sequence comprises mutations K360E and R409W, and the second, different antibody Fc sequence comprises mutations Q347R, D399V, and F405T.

### Embodiment P51

[0567] The heterodimeric Fc-fused protein of embodiment P43, wherein the first antibody Fc sequence comprises mutations Q347R, D399V, and F405T, and the second, different antibody Fc sequence comprises mutations K360E and R409W.

### Embodiment P52

[0568] A heterodimeric Fc-fused protein according to any one of embodiments P18 to P42, wherein the first antibody Fc sequence and the second, different antibody Fc sequence are IgG1 Fc sequence are mutated to promote heterodimerization with each other.

### Embodiment P53

[0569] The heterodimeric Fc-fused protein of embodiment P52, wherein the first antibody Fc sequence comprises one or more mutation(s) selected from the group consisting of K360E, K409W, and a combination thereof, and the second, different antibody Fc sequence comprises one or more mutation(s) selected from the group consisting of Q347R, D399V, F405T, and any combination(s) thereof.

### Embodiment P54

[0570] The heterodimeric Fc-fused protein of embodiment P52, wherein the first antibody Fc sequence comprises one or more mutation(s) selected from the group consisting of Q347R, D399V, F405T, and any combination(s) thereof, and the second, different antibody Fc sequence comprises one or more mutation(s) selected from the group consisting of K360E, K409W, and a combination thereof.

### Embodiment P55

[0571] The heterodimeric Fc-fused protein of embodiment P52, wherein the first antibody Fc sequence comprises mutations K360E and K409W, and the second, different antibody Fc sequence comprises mutations Q347R, D399V, and F405T.

### Embodiment P56

[0572] The heterodimeric Fc-fused protein of embodiment P52, wherein the first antibody Fc sequence comprises mutations Q347R, D399V, and F405T, and the second, different antibody Fc sequence comprises mutations K360E and K409W.

### Embodiment P57

[0573] A heterodimeric Fc-fused protein according to any one of embodiments P43 to P56, wherein the IgG4 or IgG1 Fc sequences are further mutated to reduce effector functions.

### Embodiment P58

[0574] The heterodimeric Fc-fused protein of embodiment P57, wherein the first antibody Fc sequence and the second, different antibody Fc sequence each comprise the mutation L234A, L235A or L235E, and/or P329A.

### Embodiment P59

[0575] The heterodimeric Fc-fused protein of embodiment P57 or embodiment P58, wherein the first antibody Fc sequence and the second, different antibody Fc sequence each comprise one or more mutation(s) selected from the group consisting of G237A, A330S, P331S, and any combination(s) thereof.

### Embodiment P60

[0576] The heterodimeric Fc-fused protein of embodiment P57 or embodiment P58, wherein the first antibody Fc sequence and the second, different antibody Fc sequence each comprise the mutations G237A, A330S, and P331S.

### Embodiment P61

[0577] A heterodimeric Fc-fused protein according to any one of embodiments P43 to P60, wherein the IgG4 or IgG1 Fc sequences are further mutated to introduce an inter-chain disulfide bridge.

### Embodiment P62

[0578] The heterodimeric Fc-fused protein of embodiment P61, wherein the first antibody Fc sequence comprises mutation Y349C, and the second, different antibody Fc sequence comprises mutation S354C.

### Embodiment P63

[0579] The heterodimeric Fc-fused protein of embodiment P61, wherein the first antibody Fc sequence comprises mutation S354C, and the second, different antibody Fc sequence comprises mutation Y349C.

### Embodiment P64

[0580] The heterodimeric Fc-fused protein of any one of embodiments P1 to P63, wherein the subunit of a multisubunit protein is a subunit of a multisubunit cytokine.

[0581] Embodiment P65 The heterodimeric Fc-fused protein of embodiment P64, wherein the cytokine is IL-12.

### Embodiment P66

[0582] A heterodimeric Fc-fusion protein according to any one of embodiments P1 to P65, further comprising at least one antibody variable domain.

### Embodiment P67

[0583] The heterodimeric Fc-fusion protein according to embodiment P66, wherein the at least one antibody heavy chain variable region is connected to an antibody light chain variable region to form an Fab, wherein the Fab is connected at the N-terminus of the first antibody Fc sequence and/or the second, different antibody Fc sequence.

### Embodiment P68

[0584] The heterodimeric Fc-fusion protein according to embodiment P67, wherein the protein sequence of a subunit of a multisubunit protein and the additional subunit of the multisubunit protein are connected to the C-terminus of the first antibody Fc sequence and the second, different antibody Fc sequence, respectively.

### Embodiment P69

[0585] The heterodimeric Fc-fusion protein according to embodiment

[0586] P67, wherein the protein sequence of a subunit of a multisubunit protein and the additional subunit of the multisubunit protein are connected to the C-terminus of the second, different antibody Fc sequence and the first antibody Fc sequence, respectively.

### Embodiment P70

[0587] A heterodimeric Fc-fusion protein according to embodiment P66, wherein the first polypeptide comprises an antibody heavy chain variable domain positioned C-terminal to the first antibody Fc sequence.

### Embodiment P71

[0588] A heterodimeric Fc-fusion protein according to embodiment P66 or embodiment P70, wherein the second polypeptide comprises an antibody heavy chain variable domain positioned C-terminal to the second, different antibody Fc sequence.

### Embodiment P72

[0589] The heterodimeric Fc-fusion protein according to embodiment P70 or embodiment P71, wherein the antibody heavy chain variable region is connected to an antibody light chain variable region to form an scFv.

### Embodiment P73

[0590] The heterodimeric Fc-fusion protein according to any one of embodiments P70 to 72, wherein the protein sequence of a subunit of a multisubunit protein and the additional subunit of the multisubunit protein are connected to the N-terminus of the first antibody Fc sequence and the second, different antibody Fc sequence, respectively.

### Embodiment P74

[0591] The heterodimeric Fc-fusion protein according to any one of embodiments P70 to P72, wherein the protein sequence of a subunit of a multisubunit protein and the additional subunit of the multisubunit protein are connected to the N-terminus of the second, different antibody Fc sequence and the first antibody Fc sequence, respectively.

### Embodiment P75

[0592] A heterodimeric Fc-fusion protein according to any one of embodiments P1 to P65 not comprising an antibody variable domain.

### Embodiment P76

[0593] The heterodimeric Fc-fusion protein according to any one of embodiments P1 to P65 or embodiment P75, further comprising a proteoglycan-binding domain.

### Embodiment P77

[0594] The heterodimeric Fc-fusion protein according to embodiment P76, wherein the proteoglycan-binding domain binds one or more proteoglycans that are specifically expressed in a tumor.

### Embodiment P78

[0595] The heterodimeric Fc-fusion protein according to embodiment P77, wherein the proteoglycan-binding domain binds one or more proteoglycans selected from syndecan, serglycin, CSPG4, betaglycan, glypican, perlecan, versican, brevican, and small leucine-rich proteoglycans (SLRPs).

### Embodiment P79

[0596] The heterodimeric Fc-fusion protein according to embodiment P78, wherein the SLRPs are selected from decorin, biglycan, asporin, fibrodulin, and lumican.

### Embodiment P80

[0597] The heterodimeric Fc-fusion protein according to any one of embodiments P1 to P65 or embodiments P75 to P79, further comprising a collagen-binding domain.

### Embodiment P81

[0598] The heterodimeric Fc-fusion protein according to embodiment

[0599] P80, wherein the collagen-binding domain binds one or more collagens that are specifically expressed in a tumor.

### Embodiment P82

[0600] The heterodimeric Fc-fusion protein according to any one of embodiments P1 to P65 or embodiments P75 to P81, further comprising a hyaluronic acid-binding domain.

### Embodiment P83

[0601] The heterodimeric Fc-fusion protein according to any one of embodiments P76 to P82, wherein the proteoglycan-binding domain, collagen-binding domain, or hyaluronic acid-binding domain is fused to the C-terminus of the first antibody Fc domain polypeptide or the second antibody Fc domain polypeptide.

### Embodiment P84

[0602] A formulation comprising a heterodimeric Fc-fused protein according to any one of the preceding embodiments and a pharmaceutically acceptable carrier.

### Embodiment P85

[0603] A cell comprising one or more nucleic acid(s) encoding a heterodimeric Fc-fused protein according to any one of embodiments P1 to P83.

### Embodiment P86

[0604] A method of treating cancer, wherein the method comprises administering a heterodimeric Fc-fused protein according to any one of embodiments P1 to P83 or a formulation according to embodiment P84 to a patient.

### Embodiment P87

[0605] A method of treating acute radiation syndrome, wherein the method comprises administering a heterodimeric Fc-fused protein according to any one of embodiments P1 to P83 or a formulation according to embodiment P84 to a patient.

### Embodiment P88

[0606] The method of embodiment P87, wherein the acute radiation syndrome comprises one or more syndrome(s) selected from the group consisting of hematopoietic radiation syndrome, gastrointestinal radiation syndrome, neurovascular radiation syndrome, cutaneous radiation syndrome, and any combination(s) thereof.

### Embodiment P89

[0607] A heterodimeric Fc-fused protein comprising a first polypeptide comprising the amino acid sequence of SEQ ID NO:290 and a second polypeptide comprising the amino acid sequence of SEQ ID NO:291.

### Embodiment P90

[0608] A polypeptide comprising a subunit of a multisubunit cytokine and an immunoglobulin Fc domain polypeptide, wherein the Fc domain polypeptide comprises mutations for promoting heterodimerization with a different immunoglobulin Fc domain polypeptide, and one or more mutation(s) that reduce(s) an effector function of an Fc.

### Embodiment P91

[0609] The polypeptide of embodiment P90, wherein the Fc domain is a human IgG1 antibody Fc domain.

### Embodiment P92

[0610] The polypeptide of embodiment P91, wherein the one or more mutation(s) that reduce(s) an effector function of an Fc is selected from L234A, L235A or L235E, G237A, P329A, A330S, and P331S, numbered according to the EU numbering system.

### Embodiment P93

[0611] The polypeptide of embodiment P91 or embodiment P92, wherein the mutations that reduce an effector function of an Fc are L234A, L235A, and P329A, numbered according to the EU numbering system.

### Embodiment P94

[0612] The polypeptide of any one of embodiments P91-P93, wherein the mutations for promoting heterodimerization are K360E and K409W, numbered according to the EU numbering system.

### Embodiment P95

[0613] The polypeptide of any one of embodiments P91-P93, wherein the mutations for promoting heterodimerization are Q347R, D399V, and F405T, numbered according to the EU numbering system.

### Embodiment P96

[0614] The polypeptide of embodiment P94 or P95, wherein the Fc domain further comprises a mutation for promoting disulfide bond formation with a different immunoglobulin Fc domain polypeptide.

### Embodiment P97

[0615] The polypeptide of embodiment P96, wherein when the heterodimerization mutations are K360E and K409W, the mutation for promoting disulfide bond formation is Y349C, numbered according to the EU numbering system.

### Embodiment P98

[0616] The polypeptide of embodiment P96, wherein when the heterodimerization mutations are Q347R, D399V, and F405T, the mutation for promoting disulfide bond formation is S354C, numbered according to the EU numbering system.

### Embodiment P99

[0617] The polypeptide of embodiment P97 comprising an amino acid sequence of SEQ ID NO:290.

### Embodiment P100

[0618] The polypeptide of embodiment P98 comprising an amino acid sequence of SEQ ID NO:291.

### Embodiment P101

[0619] The polypeptide of any one of embodiments P90-P100 further comprising an antibody variable domain.

### Embodiment P102

[0620] The polypeptide of embodiment P101, wherein the antibody variable domain comprises an antibody heavy chain variable domain.

### Embodiment P103

[0621] The polypeptide of embodiment P102, wherein the antibody heavy chain variable domain is fused to the N-terminus of the polypeptide.

### Embodiment P104

[0622] The polypeptide of embodiment P103, wherein the antibody heavy chain variable domain binds an antibody light chain variable domain to form an Fab.

### Embodiment P105

[0623] The polypeptide of embodiment P103, wherein the antibody heavy chain variable domain is further fused to an antibody light chain variable domain to form an scFv.

### Embodiment P106

[0624] The polypeptide of any one of embodiments P101-P105, wherein the subunit of the multisubunit cytokine is fused to the C-terminus of the immunoglobulin Fc domain.

### Embodiment P107

[0625] The polypeptide of embodiment P101, wherein the antibody heavy chain variable domain is fused to the C-terminus of the polypeptide.

### Embodiment P108

[0626] The polypeptide of embodiment P107, wherein the antibody heavy chain variable domain is further fused to an antibody light chain variable domain to form an scFv.

### Embodiment P109

[0627] The polypeptide of embodiment P107 or P108, wherein the subunit of the multi-subunit cytokine is fused to the N-terminus of the immunoglobulin Fc domain.

### Embodiment P110

[0628] A polypeptide of any one of embodiments P90-P100 not comprising an antibody variable domain.

### Embodiment P111

[0629] A polypeptide of any one of embodiments P90-P100 or P110, further comprising a proteoglycan-binding domain.

### Embodiment P112

[0630] The polypeptide of embodiment P111, wherein the proteoglycan-binding domain binds one or more proteoglycan(s) specifically expressed in a tumor.

### Embodiment P113

[0631] The polypeptide of embodiment P112, wherein the proteoglycan-binding domain binds one or more proteoglycan(s) selected from syndecan, serglycin, CSPG4, betaglycan, glypican, perlecan, versican, brevican, and small leucine-rich proteoglycans (SLRPs).

### Embodiment P114

[0632] The polypeptide of embodiment P113, wherein the SLRPs are selected from decorin, biglycan, asporin, fibrodulin, and lumican.

### Embodiment P115

[0633] The polypeptide of any one of embodiments P90-P100, or 110-114, further comprising a collagen-binding domain.

### Embodiment P116

[0634] The polypeptide of embodiment P115, wherein the collagen-binding domain binds one or more collagen(s) specifically expressed in a tumor.

### Embodiment P117

[0635] The polypeptide of any one of embodiments P90-P100, or 110-116, further comprising a hyaluronic acid-binding domain.

### Embodiment P118

[0636] The polypeptide of any one of embodiments P111-P117, wherein the proteoglycan-binding domain, collagen-binding domain, or hyaluronic acid-binding domain is fused to the C-terminus of the polypeptide.

### Embodiment P119

[0637] A nucleic acid encoding a polypeptide comprising the amino acid sequence of SEQ ID NO:290 or SEQ ID NO:291 according to any one of embodiments

[0638] P89-P118.

### Embodiment P120

[0639] An expression vector comprising a nucleic acid comprising a sequence encoding a polypeptide comprising the amino acid sequence of SEQ ID NO:290 or SEQ ID NO:291, according to any one of embodiments P89-P118.

### Embodiment P121

[0640] A cell comprising a nucleic acid of embodiment P119 or an expression vector of embodiment P120.

### INCORPORATION BY REFERENCE

[0641] The entire disclosure of each of the patent documents and scientific articles referred to herein is incorporated by reference for all purposes.

### EQUIVALENTS

[0642] The invention may be embodied in other specific forms without departing from the spirit or essential characteristics thereof. The foregoing embodiments are therefore to be considered in all respects illustrative rather than limiting the invention described herein. Scope of the invention is thus indicated by the appended claims rather than by the foregoing description, and all changes that come within the meaning and range of equivalency of the claims are intended to be embraced therein.

1. A heterodimeric Fc-fused protein comprising:
(a) a first polypeptide comprising a first antibody Fc domain polypeptide and a first subunit of a multisubunit protein; and
(b) a second polypeptide comprising a second antibody Fc domain polypeptide and a second, different subunit of the multisubunit protein,
wherein the first and second antibody Fc domain polypeptides each comprise different mutations promoting heterodimerization,
wherein the first antibody Fc domain polypeptide comprises mutation K360E, numbered according to the EU numbering system,
wherein the second antibody Fc domain polypeptide comprises mutation Q347R, numbered according to the EU numbering system,
wherein the first and second antibody Fc domain polypeptides comprise mutations that reduce an effector function of an Fc selected from the group consisting of:
(i) L234A and L235A;
(ii) L234A, L235A, and P329A;
(iii) L234A, L235A, and P329G; and
(iv) L234A, L235E, G237A, A330S, and P331S,
wherein the first subunit and second, different subunit of the multisubunit protein are bound to each other,
wherein the first and second antibody Fc domain polypeptides are optionally:
(i) IgG1, IgG2, IgG3, or IgG4 Fc domain polypeptides; and/or
(ii) human antibody Fc domain polypeptides, and
optionally wherein the first and second antibody Fc domain polypeptides are further mutated to introduce an inter-chain disulfide bond, optionally wherein:
(i) the first antibody Fc domain polypeptide comprises mutation Y349C, and the second antibody Fc domain polypeptide comprises mutation S354C; or
(ii) the first antibody Fc domain polypeptide comprises mutation S354C, and the second antibody Fc domain polypeptide comprises mutation Y349C, and
optionally wherein the heterodimeric Fc-fused protein is fucosylated.

2. The heterodimeric Fc-fused protein according to claim 1,
wherein the effector function comprises the ability of an Fc to induce antibody-dependent cellular cytotoxicity (ADCC), antibody-dependent cellular phagocytosis (ADCP), and/or complement dependent cytotoxicity (CDC).

3.-34. (canceled)

35. The heterodimeric Fc-fused protein according to claim 1,
wherein the first subunit of the multisubunit protein is fused by a first linker to the first antibody Fc domain polypeptide and the second, different subunit of the multisubunit protein is optionally fused to the second antibody Fc domain polypeptide by a second linker comprising a second amino acid sequence, wherein the first linker comprises a first amino acid sequence, wherein the first amino acid sequence comprises amino acid sequence;
(a) PKSSDKTHTCPPCPAPEX₁X₂GX₃ (SEQ ID NO:237), wherein X₁ represents L or A, X₂ represents L, E, or A, and X₃ represents A or G,
wherein when X₁ represents L and/or X₂ represents L; or
(b) RVESKYGPPCPPCPAPEFXGG (SEQ ID NO:1), wherein X represents L or E.

36. The heterodimeric Fc-fused protein according to claim 35, wherein:
(a) the first amino acid sequence comprises or consists of amino acid sequence PKSSDKTHTCPPCPAPEAAGG (SEQ ID NO:239), and the second amino acid sequence optionally comprises or consists of amino acid sequence GGGGSGGGGSGGGGSEPKSSDKTHTCPPCPAPEAAGG (SEQ ID NO:10),
(b) the first amino acid sequence comprises or consists of amino acid sequence PKSSDKTHTCPPCPAPELLGG (SEQ ID NO:238), and the second amino acid sequence optionally comprises or consists of amino acid sequence:
(i)
(SEQ ID NO: 8)
GGGGSGGGGSGGGGSEPKSSDKTHTCPPCPAPELLGG
(ii)
(SEQ ID NO: 15)
GGGGSEPKSSDKTHTCPPCPAPELLGG;
(iii)
(SEQ ID NO: 16)
GGGGSGGGGSEPKSSDKTHTCPPCPAPELLGG;
(iv)
(SEQ ID NO: 65)
GGGGSEPKSSDKTHTCPPCPAPEAAGG;
or
(v)
(SEQ ID NO: 66)
GGGGSGGGGSEPKSSDKTHTCPPCPAPEAAGG,
or
(c) the first amino acid sequence comprises or consists of amino acid sequence PKSSDKTHTCPPCPAPEAEGA (SEQ ID NO:240), and the second amino acid sequence optionally comprises or consists of amino acid sequence:
(i)
(SEQ ID NO: 12)
GGGGSGGGGSGGGGSEPKSSDKTHTCPPCPAPEAEGA;
iii)
(SEQ ID NO: 67)
GGGGSEPKSSDKTHTCPPCPAPEAEGA;
or
(iii)
(SEQ ID NO: 68)
GGGGSGGGGSEPKSSDKTHTCPPCPAPEAEGA.

37.-60. (canceled)

61. The heterodimeric Fc-fused protein according to claim 35, wherein the first amino acid sequence comprises or consists of amino acid sequence:
(a) RVESKYGPPCPPCPAPEFLGG (SEQ ID NO:2), and the second amino acid sequence optionally comprises or consists of amino acid sequence:
(i)
(SEQ ID NO: 3)
GGGGSGGGGSGGGGSRVESKYGPPCPPCPAPEFLGG,
iii)
(SEQ ID NO: 13)
GGGGSRVESKYGPPCPPCPAPEFLGG;
or
(iii)
(SEQ ID NO: 14)
GGGGSGGGGSRVESKYGPPCPPCPAPEFLGG,
or
(b) RVESKYGPPCPPCPAPEFEGG (SEQ ID NO:4), and the second amino acid sequence optionally comprises or consists of amino acid sequence:
(i)
(SEQ ID NO: 5)
GGGGSGGGGSGGGGSRVESKYGPPCPPCPAPEFEGG;
iii)
(SEQ ID NO: 63)
GGGGSRVESKYGPPCPPCPAPEFEGG;
or
(iii)
(SEQ ID NO: 64)
GGGGSGGGGSRVESKYGPPCPPCPAPEFEGG.

62.-89. (canceled)

90. The heterodimeric Fc-fused protein according to claim 1, wherein the first antibody Fc domain polypeptide further comprises mutation K409W, and the second antibody Fc domain polypeptide further comprises one or more mutation(s) selected from the group consisting of D399V, F405T, and any combination thereof, numbered according to the EU numbering system.

91. The heterodimeric Fc-fused protein according to claim 90, wherein the first antibody Fc domain polypeptide comprises mutations K360E and K409W, and the second antibody Fc domain polypeptide comprises mutations Q347R, D399V, and F405T.

92.-104. (canceled)

105. The heterodimeric Fc-fused protein according to claim 1, wherein the multisubunit protein is a multisubunit cytokine, wherein the multisubunit cytokine is optionally IL-12 wherein:
(a) the first subunit of the multisubunit cytokine is a p40 subunit of human IL-12, and the second, different subunit of the multisubunit cytokine is a p35 subunit of human IL-12, or
(b) the first subunit of the multisubunit cytokine is a p35 subunit of human IL-12, and the second, different subunit of the multisubunit cytokine is a p40 subunit of human IL-12.

106.-110. (canceled)

111. The heterodimeric Fc-fused protein of claim 1, further comprising an antibody variable domain,
wherein the antibody variable domain optionally comprises an antibody heavy chain variable domain, optionally wherein the antibody heavy chain variable domain is:
(a) fused to the N-terminus of the first antibody Fc domain polypeptide or the second antibody Fc domain polypeptide, optionally wherein the antibody heavy chain variable domain:
(i) binds an antibody light chain variable domain to form an Fab; or
(ii) is further fused to an antibody light chain variable domain to form an scFv,
wherein the first subunit and second, different subunit of the multisubunit protein are optionally fused to the C-terminus of the first antibody Fc domain polypeptide and the C-terminus of the second antibody Fc domain polypeptide, respectively, or
(b) fused to the C-terminus of the first antibody Fc domain polypeptide or the second antibody Fc domain polypeptide, optionally wherein the antibody heavy chain variable domain:
(i) is further fused to an antibody light chain variable domain to form an scFv,
wherein the first subunit and second, different subunit of the multisubunit protein are optionally fused to the N-terminus of the first antibody Fc domain polypeptide and the N-terminus of the second antibody Fc domain polypeptide, respectively.

112.-129. (canceled)

130. The heterodimeric Fc-fused protein according to claim 1, further comprising:
(a) a proteoglycan-binding domain, optionally wherein the proteoglycan-binding domain binds one or more proteoglycan(s) specifically expressed in a tumor,
wherein the proteoglycan-binding domain optionally binds one or more proteoglycan(s) selected from syndecan, serglycin, CSPG4, betaglycan, glypican, perlecan, versican, brevican, and small leucine-rich proteoglycans (SLRPs),
wherein the SLRPs are optionally selected from decorin, biglycan, asporin, fibrodulin, and lumican;
(b) a collagen-binding domain, optionally wherein the collagen-binding domain binds one or more collagen(s) specifically expressed in a tumor; and/or
(c) a hyaluronic acid-binding domain,
optionally wherein the proteoglycan-binding domain, collagen-binding domain, or hyaluronic acid-binding domain is fused to the C-terminus of the first antibody Fc domain polypeptide or the second antibody Fc domain polypeptide.

131.-146. (canceled)

147. A pharmaceutical composition comprising the heterodimeric Fc-fused protein according to claim 1, and a pharmaceutically acceptable carrier, optionally wherein the composition is suitable for intravenous, subcutaneous, intraperitoneal, or intratumoral administration.

148. (canceled)

149. A method of treating cancer, the method comprising administering to a subject in need thereof a therapeutically effective amount of the pharmaceutical composition according to claim 147.

150.-151. (canceled)

152. The method according to claim 149, further comprising administering to the patient a checkpoint blocker selected from the group consisting of: nivolumab, pembrolizumab, atezolizumab, durvalumab, avelumab, ipilimumab, tremelimumab, lirilumab, and monalizumab.

153.-156. (canceled)

157. The method according to claim 152, wherein the checkpoint blocker is nivolumab.

158.-162. (canceled)

163. The method of according to claim 149, wherein the cancer is selected from the group consisting of breast cancer, esophageal cancer, Ewing's sarcoma, follicular lymphoma, gastric cancer, head and neck cancer, melanoma, renal cell carcinoma, non-small cell lung cancer, ovarian cancer, prostate cancer, small cell lung cancer, urothelial cancer, head and neck squamous cell carcinoma (HNSCC), cervical cancer, hepatocellular carcinoma (HCC), Merkel cell carcinoma (MCC), and endometrial cancer.

164.-244. (canceled)

245. A nucleic acid encoding a polypeptide comprising an antibody Fc domain polypeptide and a subunit of a multisubunit protein,
wherein the antibody Fc domain polypeptide comprises mutation K360E, numbered according to the EU numbering system,
wherein the antibody Fc domain polypeptide comprises mutations that reduce an effector function of an Fc selected from the group consisting of:
(i) L234A and L235A;
(ii) L234A, L235A, and P329A;
(iii) L234A, L235A, and P329G; and
(iv) L234A, L235E, G237A, A330S, and P331S,
wherein the antibody Fc domain polypeptide is optionally:
(i) an IgG1, IgG2, IgG3, or IgG4 Fc domain polypeptide; and/or
(ii) a human antibody Fc domain polypeptide,
optionally wherein the antibody Fc domain polypeptide is further mutated to introduce an inter-chain disulfide bond, and
optionally wherein the antibody Fc domain polypeptide comprises mutation Y349C, or mutation S354C.

246. A nucleic acid encoding a polypeptide comprising an antibody Fc domain polypeptide and a subunit of the multisubunit protein,
wherein the antibody Fc domain polypeptide comprises mutation Q347R, numbered according to the EU numbering system,
wherein the antibody Fc domain polypeptide comprises mutations that reduce an effector function of an Fc selected from the group consisting of:
(i) L234A and L235A;
(ii) L234A, L235A, and P329A;
(iii) L234A, L235A, and P329G; and
(iv) L234A, L235E, G237A, A330S, and P331S,
wherein the antibody Fc domain polypeptide is optionally:
(i) an IgG1, IgG2, IgG3, or IgG4 Fc domain polypeptide; and/or
(ii) a human antibody Fc domain polypeptide,
optionally wherein the antibody Fc domain polypeptide is further mutated to introduce an inter-chain disulfide bond, and
optionally wherein the antibody Fc domain polypeptide comprises mutation Y349C, or mutation S354C.

247. An expression vector comprising:
(a) a nucleic acid encoding a first polypeptide comprising a first antibody Fc domain polypeptide and a first subunit of a multisubunit protein; and/or
(b) a nucleic acid encoding a second polypeptide comprising a second antibody Fc domain polypeptide and a second, different subunit of the multisubunit protein,
wherein the first and second antibody Fc domain polypeptides each comprise different mutations promoting heterodimerization,
wherein the first antibody Fc domain polypeptide comprises mutation K360E, numbered according to the EU numbering system,
wherein the second antibody Fc domain polypeptide comprises mutation Q347R, numbered according to the EU numbering system,
wherein the first and second antibody Fc domain polypeptides each comprise mutations that reduce an effector function of an Fc selected from the group consisting of:
(i) L234A and L235A;
(ii) L234A, L235A, and P329A;
(iii) L234A, L235A, and P329G; and
(iv) L234A, L235E, G237A, A330S, and P331S,
wherein the first subunit and second, different subunit of the multisubunit protein are bound to each other,
wherein the first and second antibody Fc domain polypeptides are optionally:
(i) IgG1, IgG2, IgG3, or IgG4 Fc domain polypeptides; and/or
(ii) human antibody Fc domain polypeptides, and
optionally wherein the first and second antibody Fc domain polypeptides are further mutated to introduce an inter-chain disulfide bond, optionally wherein:
(i) the first antibody Fc domain polypeptide comprises mutation Y349C, and the second antibody Fc domain polypeptide comprises mutation S354C; or
(ii) the first antibody Fc domain polypeptide comprises mutation S354C, and the second antibody Fc domain polypeptide comprises mutation Y349C.

248. A host cell comprising the expression vector according to claim 247.

249. A method of producing a heterodimeric Fc fused protein, the method comprising culturing the host cell according to claim 248 under conditions suitable for expression of the heterodimeric Fc fused protein.

250. The method according to claim 149, wherein the cancer is selected from the group consisting of breast cancer, melanoma, and non-small cell lung cancer.

The application's sequence listing, which the Patent Office published only in electronic form, follows.

SEQUENCE LISTING (299 sequences)

SEQ ID NO: 1 - protein, 21 aa, Artificial Sequence
  Description of Artificial Sequence: Synthetic peptide
  MOD_RES (19)..(19): Leu or Glu
RVESKYGPPCPPCPAPEFXGG

SEQ ID NO: 2 - protein, 21 aa, Artificial Sequence
  Description of Artificial Sequence: Synthetic peptide
RVESKYGPPCPPCPAPEFLGG

SEQ ID NO: 3 - protein, 36 aa, Artificial Sequence
  Description of Artificial Sequence: Synthetic polypeptide
GGGGSGGGGSGGGGSRVESKYGPPCPPCPAPEFLGG

SEQ ID NO: 4 - protein, 21 aa, Artificial Sequence
  Description of Artificial Sequence: Synthetic peptide
RVESKYGPPCPPCPAPEFEGG

SEQ ID NO: 5 - protein, 36 aa, Artificial Sequence
  Description of Artificial Sequence: Synthetic polypeptide
GGGGSGGGGSGGGGSRVESKYGPPCPPCPAPEFEGG

SEQ ID NO: 6 - protein, 22 aa, Artificial Sequence
  Description of Artificial Sequence: Synthetic peptide
  MOD_RES (19)..(19): Leu or Ala
  MOD_RES (20)..(20): Leu, Glu or Ala
  MOD_RES (22)..(22): Ala or Gly
EPKSSDKTHTCPPCPAPEXXGX

SEQ ID NO: 7 - protein, 22 aa, Artificial Sequence
  Description of Artificial Sequence: Synthetic peptide
EPKSSDKTHTCPPCPAPELLGG

SEQ ID NO: 8 - protein, 37 aa, Artificial Sequence
  Description of Artificial Sequence: Synthetic polypeptide
GGGGSGGGGSGGGGSEPKSSDKTHTCPPCPAPELLGG

SEQ ID NO: 9 - protein, 22 aa, Artificial Sequence
  Description of Artificial Sequence: Synthetic peptide
EPKSSDKTHTCPPCPAPEAAGG

SEQ ID NO: 10 - protein, 37 aa, Artificial Sequence
  Description of Artificial Sequence: Synthetic polypeptide
GGGGSGGGGSGGGGSEPKSSDKTHTCPPCPAPEAAGG

SEQ ID NO: 11 - protein, 22 aa, Artificial Sequence
  Description of Artificial Sequence: Synthetic peptide
EPKSSDKTHTCPPCPAPEAEGA

SEQ ID NO: 12 - protein, 37 aa, Artificial Sequence
  Description of Artificial Sequence: Synthetic polypeptide
GGGGSGGGGSGGGGSEPKSSDKTHTCPPCPAPEAEGA

SEQ ID NO: 13 - protein, 26 aa, Artificial Sequence
  Description of Artificial Sequence: Synthetic peptide
GGGGSRVESKYGPPCPPCPAPEFLGG

SEQ ID NO: 14 - protein, 31 aa, Artificial Sequence
  Description of Artificial Sequence: Synthetic polypeptide
GGGGSGGGGSRVESKYGPPCPPCPAPEFLGG

SEQ ID NO: 15 - protein, 27 aa, Artificial Sequence
  Description of Artificial Sequence: Synthetic peptide
GGGGSEPKSSDKTHTCPPCPAPELLGG

SEQ ID NO: 16 - protein, 32 aa, Artificial Sequence
  Description of Artificial Sequence: Synthetic polypeptide
GGGGSGGGGSEPKSSDKTHTCPPCPAPELLGG

SEQ ID NO: 17 - protein, 536 aa, Artificial Sequence
  Description of Artificial Sequence: Synthetic polypeptide
IWELKKDVYVVELDWYPDAPGEMVVLTCDTPEEDGITWTLDQSSEVLGSGKTLTIRVKEFGDAGQYTCHKGGEVLSHSLLLLHKKEDGIWSTDILKDQKEPKNKTFLRCEAKNYSGRFTCWWLTTISTDLTFSVKSSRGSSDPQGVTCGAATLSAERVRGDNKEYEYSVECQEDSACPAAEESLPIEVMVDAVHKLKYENYTSSFFIRDIIKPDPPKNLQLKPLKNSRQVEVSWEYPDTWSTPHSYFSLTFCVQVQGKSKREKKDRVFTDKTSATVICRKNASISVRAQDRYYSSSWSEWASVPCSRVESKYGPPCPPCPAPEFLGGPSVFLFPPKPKDTLMISRTPEVTCVVVDVSQEDPEVQFNWYVDGVEVHNAKTKPREEQFNSTYRVVSVLTVLHQDWLNGKEYKCKVSNKGLPSSIEKTISKAKGQPREPQVCTLPPSQEEMTKNQVSLTCLVEGFYPSDIAVEWESNGQPENNYKTTPPVLDSDGSFFLYSWLTVDKSRWQEGNVFSCSVMHEALHNHYTQKSLSLSLG

SEQ ID NO: 18 - protein, 442 aa, Artificial Sequence
  Description of Artificial Sequence: Synthetic polypeptide
RNLPVATPDPGMFPCLHHSQNLLRAVSNMLQKARQTLEFYPCTSEEIDHVDITKDKTSTVEACLPLELTKNESCLNSRETSFITNGSCLASRKTSFMMALCLSSIYEDLKMYQVEFKTMNAKLLMDPKRQIFLDQNMLAVIDELMQALNFNSETVPQKSSLEEPDFYKTKIKLCILLHAFRIRAVTIDRVMSYLNASGGGGSGGGGSGGGGSRVESKYGPPCPPCPAPEFLGGPSVFLFPPKPKDTLMISRTPEVTCVVVDVSQEDPEVQFNWYVDGVEVHNAKTKPREEQFNSTYRVVSVLTVLHQDWLNGKEYKCKVSNKGLPSSIEKTISKAKGQPREPQVYTLPPCQENMTKNQVSLTCLVKGFYPSDIAVEWESNGQPENNYKTTPPVLVSDGSFTLYSRLTVDKSRWQEGNVFSCSVMHEALHNHYTQKSLSLSLG

SEQ ID NO: 19 - protein, 536 aa, Artificial Sequence
  Description of Artificial Sequence: Synthetic polypeptide
IWELKKDVYVVELDWYPDAPGEMVVLTCDTPEEDGITWTLDQSSEVLGSGKTLTIRVKEFGDAGQYTCHKGGEVLSHSLLLLHKKEDGIWSTDILKDQKEPKNKTFLRCEAKNYSGRFTCWWLTTISTDLTFSVKSSRGSSDPQGVTCGAATLSAERVRGDNKEYEYSVECQEDSACPAAEESLPIEVMVDAVHKLKYENYTSSFFIRDIIKPDPPKNLQLKPLKNSRQVEVSWEYPDTWSTPHSYFSLTFCVQVQGKSKREKKDRVFTDKTSATVICRKNASISVRAQDRYYSSSWSEWASVPCSRVESKYGPPCPPCPAPEFLGGPSVFLFPPKPKDTLMISRTPEVTCVVVDVSQEDPEVQFNWYVDGVEVHNAKTKPREEQFNSTYRVVSVLTVLHQDWLNGKEYKCKVSNKGLPSSIEKTISKAKGQPREPQVCTLPPSQEEMTENQVSLTCLVKGFYPSDIAVEWESNGQPENNYKTTPPVLDSDGSFFLYSWLTVDKSRWQEGNVFSCSVMHEALHNHYTQKSLSLSLG

SEQ ID NO: 20 - protein, 442 aa, Artificial Sequence
  Description of Artificial Sequence: Synthetic polypeptide
RNLPVATPDPGMFPCLHHSQNLLRAVSNMLQKARQTLEFYPCTSEEIDHVDITKDKTSTVEACLPLELTKNESCLNSRETSFITNGSCLASRKTSFMMALCLSSIYEDLKMYQVEFKTMNAKLLMDPKRQIFLDQNMLAVIDELMQALNFNSETVPQKSSLEEPDFYKTKIKLCILLHAFRIRAVTIDRVMSYLNASGGGGSGGGGSGGGGSRVESKYGPPCPPCPAPEFLGGPSVFLFPPKPKDTLMISRTPEVTCVVVDVSQEDPEVQFNWYVDGVEVHNAKTKPREEQFNSTYRVVSVLTVLHQDWLNGKEYKCKVSNKGLPSSIEKTISKAKGQPREPRVYTLPPCQEEMTKNQVSLTCLVKGFYPSDIAVEWESNGQPENNYKTTPPVLVSDGSFTLYSRLTVDKSRWQEGNVFSCSVMHEALHNHYTQKSLSLSLG

SEQ ID NO: 21 - protein, 536 aa, Artificial Sequence
  Description of Artificial Sequence: Synthetic polypeptide
IWELKKDVYVVELDWYPDAPGEMVVLTCDTPEEDGITWTLDQSSEVLGSGKTLTIRVKEFGDAGQYTCHKGGEVLSHSLLLLHKKEDGIWSTDILKDQKEPKNKTFLRCEAKNYSGRFTCWWLTTISTDLTFSVKSSRGSSDPQGVTCGAATLSAERVRGDNKEYEYSVECQEDSACPAAEESLPIEVMVDAVHKLKYENYTSSFFIRDIIKPDPPKNLQLKPLKNSRQVEVSWEYPDTWSTPHSYFSLTFCVQVQGKSKREKKDRVFTDKTSATVICRKNASISVRAQDRYYSSSWSEWASVPCSRVESKYGPPCPPCPAPEFEGGPSVFLFPPKPKDTLMISRTPEVTCVVVDVSQEDPEVQFNWYVDGVEVHNAKTKPREEQFNSTYRVVSVLTVLHQDWLNGKEYKCKVSNKGLPSSIEKTISKAKGQPREPQVCTLPPSQEEMTENQVSLTCLVKGFYPSDIAVEWESNGQPENNYKTTPPVLDSDGSFFLYSWLTVDKSRWQEGNVFSCSVMHEALHNHYTQKSLSLSLG

SEQ ID NO: 22 - protein, 442 aa, Artificial Sequence
  Description of Artificial Sequence: Synthetic polypeptide
RNLPVATPDPGMFPCLHHSQNLLRAVSNMLQKARQTLEFYPCTSEEIDHVDITKDKTSTVEACLPLELTKNESCLNSRETSFITNGSCLASRKTSFMMALCLSSIYEDLKMYQVEFKTMNAKLLMDPKRQIFLDQNMLAVIDELMQALNFNSETVPQKSSLEEPDFYKTKIKLCILLHAFRIRAVTIDRVMSYLNASGGGGSGGGGSGGGGSRVESKYGPPCPPCPAPEFEGGPSVFLFPPKPKDTLMISRTPEVTCVVVDVSQEDPEVQFNWYVDGVEVHNAKTKPREEQFNSTYRVVSVLTVLHQDWLNGKEYKCKVSNKGLPSSIEKTISKAKGQPREPRVYTLPPCQEEMTKNQVSLTCLVKGFYPSDIAVEWESNGQPENNYKTTPPVLVSDGSFTLYSRLTVDKSRWQEGNVFSCSVMHEALHNHYTQKSLSLSLG

SEQ ID NO: 23 - protein, 536 aa, Artificial Sequence
  Description of Artificial Sequence: Synthetic polypeptide
IWELKKDVYVVELDWYPDAPGEMVVLTCDTPEEDGITWTLDQSSEVLGSGKTLTIRVKEFGDAGQYTCHKGGEVLSHSLLLLHKKEDGIWSTDILKDQKEPKNKTFLRCEAKNYSGRFTCWWLTTISTDLTFSVKSSRGSSDPQGVTCGAATLSAERVRGDNKEYEYSVECQEDSACPAAEESLPIEVMVDAVHKLKYENYTSSFFIRDIIKPDPPKNLQLKPLKNSRQVEVSWEYPDTWSTPHSYFSLTFCVQVQGKSKREKKDRVFTDKTSATVICRKNASISVRAQDRYYSSSWSEWASVPCSRVESKYGPPCPPCPAPEFEGGPSVFLFPPKPKDTLMISRTPEVTCVVVDVSQEDPEVQFNWYVDGVEVHNAKTKPREEQFNSTYRVVSVLTVLHQDWLNGKEYKCKVSNKGLASSIEKTISKAKGQPREPQVCTLPPSQEEMTENQVSLTCLVKGFYPSDIAVEWESNGQPENNYKTTPPVLDSDGSFFLYSWLTVDKSRWQEGNVFSCSVMHEALHNHYTQKSLSLSLG

SEQ ID NO: 24 - protein, 442 aa, Artificial Sequence
  Description of Artificial Sequence: Synthetic polypeptide
RNLPVATPDPGMFPCLHHSQNLLRAVSNMLQKARQTLEFYPCTSEEIDHVDITKDKTSTVEACLPLELTKNESCLNSRETSFITNGSCLASRKTSFMMALCLSSIYEDLKMYQVEFKTMNAKLLMDPKRQIFLDQNMLAVIDELMQALNFNSETVPQKSSLEEPDFYKTKIKLCILLHAFRIRAVTIDRVMSYLNASGGGGSGGGGSGGGGSRVESKYGPPCPPCPAPEFEGGPSVFLFPPKPKDTLMISRTPEVTCVVVDVSQEDPEVQFNWYVDGVEVHNAKTKPREEQFNSTYRVVSVLTVLHQDWLNGKEYKCKVSNKGLASSIEKTISKAKGQPREPRVYTLPPCQEEMTKNQVSLTCLVKGFYPSDIAVEWESNGQPENNYKTTPPVLVSDGSFTLYSRLTVDKSRWQEGNVFSCSVMHEALHNHYTQKSLSLSLG

SEQ ID NO: 25 - protein, 536 aa, Artificial Sequence
  Description of Artificial Sequence: Synthetic polypeptide
IWELKKDVYVVELDWYPDAPGEMVVLTCDTPEEDGITWTLDQSSEVLGSGKTLTIRVKEFGDAGQYTCHKGGEVLSHSLLLLHKKEDGIWSTDILKDQKEPKNKTFLRCEAKNYSGRFTCWWLTTISTDLTFSVKSSRGSSDPQGVTCGAATLSAERVRGDNKEYEYSVECQEDSACPAAEESLPIEVMVDAVHKLKYENYTSSFFIRDIIKPDPPKNLQLKPLKNSRQVEVSWEYPDTWSTPHSYFSLTFCVQVQGKSKREKKDRVFTDKTSATVICRKNASISVRAQDRYYSSSWSEWASVPCSRVESKYGPPCPPCPAPEFEGGPSVFLFPPKPKDTLMISRTPEVTCVVVDVSQEDPEVQFNWYVDGVEVHNAKTKPREEQFNSTYRVVSVLTVLHQDWLNGKEYKCKVSNKGLGSSIEKTISKAKGQPREPQVCTLPPSQEEMTENQVSLTCLVKGFYPSDIAVEWESNGQPENNYKTTPPVLDSDGSFFLYSWLTVDKSRWQEGNVFSCSVMHEALHNHYTQKSLSLSLG

SEQ ID NO: 26 - protein, 442 aa, Artificial Sequence
  Description of Artificial Sequence: Synthetic polypeptide
RNLPVATPDPGMFPCLHHSQNLLRAVSNMLQKARQTLEFYPCTSEEIDHVDITKDKTSTVEACLPLELTKNESCLNSRETSFITNGSCLASRKTSFMMALCLSSIYEDLKMYQVEFKTMNAKLLMDPKRQIFLDQNMLAVIDELMQALNFNSETVPQKSSLEEPDFYKTKIKLCILLHAFRIRAVTIDRVMSYLNASGGGGSGGGGSGGGGSRVESKYGPPCPPCPAPEFEGGPSVFLFPPKPKDTLMISRTPEVTCVVVDVSQEDPEVQFNWYVDGVEVHNAKTKPREEQFNSTYRVVSVLTVLHQDWLNGKEYKCKVSNKGLGSSIEKTISKAKGQPREPRVYTLPPCQEEMTKNQVSLTCLVKGFYPSDIAVEWESNGQPENNYKTTPPVLVSDGSFTLYSRLTVDKSRWQEGNVFSCSVMHEALHNHYTQKSLSLSLG

SEQ ID NO: 27 - protein, 537 aa, Artificial Sequence
  Description of Artificial Sequence: Synthetic polypeptide
IWELKKDVYVVELDWYPDAPGEMVVLTCDTPEEDGITWTLDQSSEVLGSGKTLTIRVKEFGDAGQYTCHKGGEVLSHSLLLLHKKEDGIWSTDILKDQKEPKNKTFLRCEAKNYSGRFTCWWLTTISTDLTFSVKSSRGSSDPQGVTCGAATLSAERVRGDNKEYEYSVECQEDSACPAAEESLPIEVMVDAVHKLKYENYTSSFFIRDIIKPDPPKNLQLKPLKNSRQVEVSWEYPDTWSTPHSYFSLTFCVQVQGKSKREKKDRVFTDKTSATVICRKNASISVRAQDRYYSSSWSEWASVPCSEPKSSDKTHTCPPCPAPELLGGPSVFLFPPKPKDTLMISRTPEVTCVVVDVSHEDPEVKFNWYVDGVEVHNAKTKPREEQYNSTYRVVSVLTVLHQDWLNGKEYKCKVSNKALPAPIEKTISKAKGQPREPQVCTLPPSRDELTENQVSLTCLVKGFYPSDIAVEWESNGQPENNYKTTPPVLDSDGSFFLYSWLTVDKSRWQQGNVFSCSVMHEALHNHYTQKSLSLSPG

SEQ ID NO: 28 - protein, 443 aa, Artificial Sequence
  Description of Artificial Sequence: Synthetic polypeptide
RNLPVATPDPGMFPCLHHSQNLLRAVSNMLQKARQTLEFYPCTSEEIDHVDITKDKTSTVEACLPLELTKNESCLNSRETSFITNGSCLASRKTSFMMALCLSSIYEDLKMYQVEFKTMNAKLLMDPKRQIFLDQNMLAVIDELMQALNFNSETVPQKSSLEEPDFYKTKIKLCILLHAFRIRAVTIDRVMSYLNASGGGGSGGGGSGGGGSEPKSSDKTHTCPPCPAPELLGGPSVFLFPPKPKDTLMISRTPEVTCVVVDVSHEDPEVKFNWYVDGVEVHNAKTKPREEQYNSTYRVVSVLTVLHQDWLNGKEYKCKVSNKALPAPIEKTISKAKGQPREPRVYTLPPCRDELTKNQVSLTCLVKGFYPSDIAVEWESNGQPENNYKTTPPVLVSDGSFTLYSKLTVDKSRWQQGNVFSCSVMHEALHNHYTQKSLSLSPG

SEQ ID NO: 29 - protein, 537 aa, Artificial Sequence
  Description of Artificial Sequence: Synthetic polypeptide
IWELKKDVYVVELDWYPDAPGEMVVLTCDTPEEDGITWTLDQSSEVLGSGKTLTIRVKEFGDAGQYTCHKGGEVLSHSLLLLHKKEDGIWSTDILKDQKEPKNKTFLRCEAKNYSGRFTCWWLTTISTDLTFSVKSSRGSSDPQGVTCGAATLSAERVRGDNKEYEYSVECQEDSACPAAEESLPIEVMVDAVHKLKYENYTSSFFIRDIIKPDPPKNLQLKPLKNSRQVEVSWEYPDTWSTPHSYFSLTFCVQVQGKSKREKKDRVFTDKTSATVICRKNASISVRAQDRYYSSSWSEWASVPCSEPKSSDKTHTCPPCPAPEAAGGPSVFLFPPKPKDTLMISRTPEVTCVVVDVSHEDPEVKFNWYVDGVEVHNAKTKPREEQYNSTYRVVSVLTVLHQDWLNGKEYKCKVSNKALPAPIEKTISKAKGQPREPQVCTLPPSRDELTENQVSLTCLVKGFYPSDIAVEWESNGQPENNYKTTPPVLDSDGSFFLYSWLTVDKSRWQQGNVFSCSVMHEALHNHYTQKSLSLSPG

SEQ ID NO: 30 - protein, 443 aa, Artificial Sequence
  Description of Artificial Sequence: Synthetic polypeptide
RNLPVATPDPGMFPCLHHSQNLLRAVSNMLQKARQTLEFYPCTSEEIDHVDITKDKTSTVEACLPLELTKNESCLNSRETSFITNGSCLASRKTSFMMALCLSSIYEDLKMYQVEFKTMNAKLLMDPKRQIFLDQNMLAVIDELMQALNFNSETVPQKSSLEEPDFYKTKIKLCILLHAFRIRAVTIDRVMSYLNASGGGGSGGGGSGGGGSEPKSSDKTHTCPPCPAPEAAGGPSVFLFPPKPKDTLMISRTPEVTCVVVDVSHEDPEVKFNWYVDGVEVHNAKTKPREEQYNSTYRVVSVLTVLHQDWLNGKEYKCKVSNKALPAPIEKTISKAKGQPREPRVYTLPPCRDELTKNQVSLTCLVKGFYPSDIAVEWESNGQPENNYKTTPPVLVSDGSFTLYSKLTVDKSRWQQGNVFSCSVMHEALHNHYTQKSLSLSPG

SEQ ID NO: 31 - protein, 537 aa, Artificial Sequence
  Description of Artificial Sequence: Synthetic polypeptide
IWELKKDVYVVELDWYPDAPGEMVVLTCDTPEEDGITWTLDQSSEVLGSGKTLTIRVKEFGDAGQYTCHKGGEVLSHSLLLLHKKEDGIWSTDILKDQKEPKNKTFLRCEAKNYSGRFTCWWLTTISTDLTFSVKSSRGSSDPQGVTCGAATLSAERVRGDNKEYEYSVECQEDSACPAAEESLPIEVMVDAVHKLKYENYTSSFFIRDIIKPDPPKNLQLKPLKNSRQVEVSWEYPDTWSTPHSYFSLTFCVQVQGKSKREKKDRVFTDKTSATVICRKNASISVRAQDRYYSSSWSEWASVPCSEPKSSDKTHTCPPCPAPEAAGGPSVFLFPPKPKDTLMISRTPEVTCVVVDVSHEDPEVKFNWYVDGVEVHNAKTKPREEQYNSTYRVVSVLTVLHQDWLNGKEYKCKVSNKALAAPIEKTISKAKGQPREPQVCTLPPSRDELTENQVSLTCLVKGFYPSDIAVEWESNGQPENNYKTTPPVLDSDGSFFLYSWLTVDKSRWQQGNVFSCSVMHEALHNHYTQKSLSLSPG

SEQ ID NO: 32 - protein, 443 aa, Artificial Sequence
  Description of Artificial Sequence: Synthetic polypeptide
RNLPVATPDPGMFPCLHHSQNLLRAVSNMLQKARQTLEFYPCTSEEIDHVDITKDKTSTVEACLPLELTKNESCLNSRETSFITNGSCLASRKTSFMMALCLSSIYEDLKMYQVEFKTMNAKLLMDPKRQIFLDQNMLAVIDELMQALNFNSETVPQKSSLEEPDFYKTKIKLCILLHAFRIRAVTIDRVMSYLNASGGGGSGGGGSGGGGSEPKSSDKTHTCPPCPAPEAAGGPSVFLFPPKPKDTLMISRTPEVTCVVVDVSHEDPEVKFNWYVDGVEVHNAKTKPREEQYNSTYRVVSVLTVLHQDWLNGKEYKCKVSNKALAAPIEKTISKAKGQPREPRVYTLPPCRDELTKNQVSLTCLVKGFYPSDIAVEWESNGQPENNYKTTPPVLVSDGSFTLYSKLTVDKSRWQQGNVFSCSVMHEALHNHYTQKSLSLSPG

SEQ ID NO: 33 - protein, 537 aa, Artificial Sequence
  Description of Artificial Sequence: Synthetic polypeptide
IWELKKDVYVVELDWYPDAPGEMVVLTCDTPEEDGITWTLDQSSEVLGSGKTLTIRVKEFGDAGQYTCHKGGEVLSHSLLLLHKKEDGIWSTDILKDQKEPKNKTFLRCEAKNYSGRFTCWWLTTISTDLTFSVKSSRGSSDPQGVTCGAATLSAERVRGDNKEYEYSVECQEDSACPAAEESLPIEVMVDAVHKLKYENYTSSFFIRDIIKPDPPKNLQLKPLKNSRQVEVSWEYPDTWSTPHSYFSLTFCVQVQGKSKREKKDRVFTDKTSATVICRKNASISVRAQDRYYSSSWSEWASVPCSEPKSSDKTHTCPPCPAPEAAGGPSVFLFPPKPKDTLMISRTPEVTCVVVDVSHEDPEVKFNWYVDGVEVHNAKTKPREEQYNSTYRVVSVLTVLHQDWLNGKEYKCKVSNKALGAPIEKTISKAKGQPREPQVCTLPPSRDELTENQVSLTCLVKGFYPSDIAVEWESNGQPENNYKTTPPVLDSDGSFFLYSWLTVDKSRWQQGNVFSCSVMHEALHNHYTQKSLSLSPG

SEQ ID NO: 34 - protein, 443 aa, Artificial Sequence
  Description of Artificial Sequence: Synthetic polypeptide
RNLPVATPDPGMFPCLHHSQNLLRAVSNMLQKARQTLEFYPCTSEEIDHVDITKDKTSTVEACLPLELTKNESCLNSRETSFITNGSCLASRKTSFMMALCLSSIYEDLKMYQVEFKTMNAKLLMDPKRQIFLDQNMLAVIDELMQALNFNSETVPQKSSLEEPDFYKTKIKLCILLHAFRIRAVTIDRVMSYLNASGGGGSGGGGSGGGGSEPKSSDKTHTCPPCPAPEAAGGPSVFLFPPKPKDTLMISRTPEVTCVVVDVSHEDPEVKFNWYVDGVEVHNAKTKPREEQYNSTYRVVSVLTVLHQDWLNGKEYKCKVSNKALGAPIEKTISKAKGQPREPRVYTLPPCRDELTKNQVSLTCLVKGFYPSDIAVEWESNGQPENNYKTTPPVLVSDGSFTLYSKLTVDKSRWQQGNVFSCSVMHEALHNHYTQKSLSLSPG

SEQ ID NO: 35 - protein, 537 aa, Artificial Sequence
  Description of Artificial Sequence: Synthetic polypeptide
IWELKKDVYVVELDWYPDAPGEMVVLTCDTPEEDGITWTLDQSSEVLGSGKTLTIRVKEFGDAGQYTCHKGGEVLSHSLLLLHKKEDGIWSTDILKDQKEPKNKTFLRCEAKNYSGRFTCWWLTTISTDLTFSVKSSRGSSDPQGVTCGAATLSAERVRGDNKEYEYSVECQEDSACPAAEESLPIEVMVDAVHKLKYENYTSSFFIRDIIKPDPPKNLQLKPLKNSRQVEVSWEYPDTWSTPHSYFSLTFCVQVQGKSKREKKDRVFTDKTSATVICRKNASISVRAQDRYYSSSWSEWASVPCSEPKSSDKTHTCPPCPAPEAEGAPSVFLFPPKPKDTLMISRTPEVTCVVVDVSHEDPEVKFNWYVDGVEVHNAKTKPREEQYNSTYRVVSVLTVLHQDWLNGKEYKCKVSNKALPSSIEKTISKAKGQPREPQVCTLPPSRDELTENQVSLTCLVKGFYPSDIAVEWESNGQPENNYKTTPPVLDSDGSFFLYSWLTVDKSRWQQGNVFSCSVMHEALHNHYTQKSLSLSPG

SEQ ID NO: 36 - protein, 443 aa, Artificial Sequence
  Description of Artificial Sequence: Synthetic polypeptide
RNLPVATPDPGMFPCLHHSQNLLRAVSNMLQKARQTLEFYPCTSEEIDHVDITKDKTSTVEACLPLELTKNESCLNSRETSFITNGSCLASRKTSFMMALCLSSIYEDLKMYQVEFKTMNAKLLMDPKRQIFLDQNMLAVIDELMQALNFNSETVPQKSSLEEPDFYKTKIKLCILLHAFRIRAVTIDRVMSYLNASGGGGSGGGGSGGGGSEPKSSDKTHTCPPCPAPEAEGAPSVFLFPPKPKDTLMISRTPEVTCVVVDVSHEDPEVKFNWYVDGVEVHNAKTKPREEQYNSTYRVVSVLTVLHQDWLNGKEYKCKVSNKALPSSIEKTISKAKGQPREPRVYTLPPCRDELTKNQVSLTCLVKGFYPSDIAVEWESNGQPENNYKTTPPVLVSDGSFTLYSKLTVDKSRWQQGNVFSCSVMHEALHNHYTQKSLSLSPG

SEQ ID NO: 37 - protein, 536 aa, Artificial Sequence; identical to SEQ ID NO: 17
  Description of Artificial Sequence: Synthetic polypeptide

SEQ ID NO: 38 - protein, 427 aa, Artificial Sequence
  Description of Artificial Sequence: Synthetic polypeptide
RNLPVATPDPGMFPCLHHSQNLLRAVSNMLQKARQTLEFYPCTSEEIDHVDITKDKTSTVEACLPLELTKNESCLNSRETSFITNGSCLASRKTSFMMALCLSSIYEDLKMYQVEFKTMNAKLLMDPKRQIFLDQNMLAVIDELMQALNFNSETVPQKSSLEEPDFYKTKIKLCILLHAFRIRAVTIDRVMSYLNASRVESKYGPPCPPCPAPEFLGGPSVFLFPPKPKDTLMISRTPEVTCVVVDVSQEDPEVQFNWYVDGVEVHNAKTKPREEQFNSTYRVVSVLTVLHQDWLNGKEYKCKVSNKGLPSSIEKTISKAKGQPREPQVYTLPPCQENMTKNQVSLTCLVKGFYPSDIAVEWESNGQPENNYKTTPPVLVSDGSFTLYSRLTVDKSRWQEGNVFSCSVMHEALHNHYTQKSLSLSLG

SEQ ID NO: 39 - protein, 536 aa, Artificial Sequence; identical to SEQ ID NO: 17
  Description of Artificial Sequence: Synthetic polypeptide

SEQ ID NO: 40 - protein, 432 aa, Artificial Sequence
  Description of Artificial Sequence: Synthetic polypeptide
RNLPVATPDPGMFPCLHHSQNLLRAVSNMLQKARQTLEFYPCTSEEIDHVDITKDKTSTVEACLPLELTKNESCLNSRETSFITNGSCLASRKTSFMMALCLSSIYEDLKMYQVEFKTMNAKLLMDPKRQIFLDQNMLAVIDELMQALNFNSETVPQKSSLEEPDFYKTKIKLCILLHAFRIRAVTIDRVMSYLNASGGGGSRVESKYGPPCPPCPAPEFLGGPSVFLFPPKPKDTLMISRTPEVTCVVVDVSQEDPEVQFNWYVDGVEVHNAKTKPREEQFNSTYRVVSVLTVLHQDWLNGKEYKCKVSNKGLPSSIEKTISKAKGQPREPQVYTLPPCQENMTKNQVSLTCLVKGFYPSDIAVEWESNGQPENNYKTTPPVLVSDGSFTLYSRLTVDKSRWQEGNVFSCSVMHEALHNHYTQKSLSLSLG

SEQ ID NO: 41 - protein, 536 aa, Artificial Sequence; identical to SEQ ID NO: 17
  Description of Artificial Sequence: Synthetic polypeptide

SEQ ID NO: 42 - protein, 437 aa, Artificial Sequence
  Description of Artificial Sequence: Synthetic polypeptide
RNLPVATPDPGMFPCLHHSQNLLRAVSNMLQKARQTLEFYPCTSEEIDHVDITKDKTSTVEACLPLELTKNESCLNSRETSFITNGSCLASRKTSFMMALCLSSIYEDLKMYQVEFKTMNAKLLMDPKRQIFLDQNMLAVIDELMQALNFNSETVPQKSSLEEPDFYKTKIKLCILLHAFRIRAVTIDRVMSYLNASGGGGSGGGGSRVESKYGPPCPPCPAPEFLGGPSVFLFPPKPKDTLMISRTPEVTCVVVDVSQEDPEVQFNWYVDGVEVHNAKTKPREEQFNSTYRVVSVLTVLHQDWLNGKEYKCKVSNKGLPSSIEKTISKAKGQPREPQVYTLPPCQENMTKNQVSLTCLVKGFYPSDIAVEWESNGQPENNYKTTPPVLVSDGSFTLYSRLTVDKSRWQEGNVFSCSVMHEALHNHYTQKSLSLSLG

SEQ ID NO: 43 - protein, 537 aa, Artificial Sequence; identical to SEQ ID NO: 27
  Description of Artificial Sequence: Synthetic polypeptide

SEQ ID NO: 44 - protein, 428 aa, Artificial Sequence
  Description of Artificial Sequence: Synthetic polypeptide
RNLPVATPDPGMFPCLHHSQNLLRAVSNMLQKARQTLEFYPCTSEEIDHVDITKDKTSTVEACLPLELTKNESCLNSRETSFITNGSCLASRKTSFMMALCLSSIYEDLKMYQVEFKTMNAKLLMDPKRQIFLDQNMLAVIDELMQALNFNSETVPQKSSLEEPDFYKTKIKLCILLHAFRIRAVTIDRVMSYLNASEPKSSDKTHTCPPCPAPELLGGPSVFLFPPKPKDTLMISRTPEVTCVVVDVSHEDPEVKFNWYVDGVEVHNAKTKPREEQYNSTYRVVSVLTVLHQDWLNGKEYKCKVSNKALPAPIEKTISKAKGQPREPRVYTLPPCRDELTKNQVSLTCLVKGFYPSDIAVEWESNGQPENNYKTTPPVLVSDGSFTLYSKLTVDKSRWQQGNVFSCSVMHEALHNHYTQKSLSLSPG

SEQ ID NO: 45 - protein, 537 aa, Artificial Sequence; identical to SEQ ID NO: 27
  Description of Artificial Sequence: Synthetic polypeptide

SEQ ID NO: 46 - protein, 433 aa, Artificial Sequence
  Description of Artificial Sequence: Synthetic polypeptide
RNLPVATPDPGMFPCLHHSQNLLRAVSNMLQKARQTLEFYPCTSEEIDHVDITKDKTSTVEACLPLELTKNESCLNSRETSFITNGSCLASRKTSFMMALCLSSIYEDLKMYQVEFKTMNAKLLMDPKRQIFLDQNMLAVIDELMQALNFNSETVPQKSSLEEPDFYKTKIKLCILLHAFRIRAVTIDRVMSYLNASGGGGSEPKSSDKTHTCPPCPAPELLGGPSVFLFPPKPKDTLMISRTPEVTCVVVDVSHEDPEVKFNWYVDGVEVHNAKTKPREEQYNSTYRVVSVLTVLHQDWLNGKEYKCKVSNKALPAPIEKTISKAKGQPREPRVYTLPPCRDELTKNQVSLTCLVKGFYPSDIAVEWESNGQPENNYKTTPPVLVSDGSFTLYSKLTVDKSRWQQGNVFSCSVMHEALHNHYTQKSLSLSPG

SEQ ID NO: 47 - protein, 537 aa, Artificial Sequence; identical to SEQ ID NO: 27
  Description of Artificial Sequence: Synthetic polypeptide

SEQ ID NO: 48 - protein, 438 aa, Artificial Sequence
  Description of Artificial Sequence: Synthetic polypeptide
RNLPVATPDPGMFPCLHHSQNLLRAVSNMLQKARQTLEFYPCTSEEIDHVDITKDKTSTVEACLPLELTKNESCLNSRETSFITNGSCLASRKTSFMMALCLSSIYEDLKMYQVEFKTMNAKLLMDPKRQIFLDQNMLAVIDELMQALNFNSETVPQKSSLEEPDFYKTKIKLCILLHAFRIRAVTIDRVMSYLNASGGGGSGGGGSEPKSSDKTHTCPPCPAPELLGGPSVFLFPPKPKDTLMISRTPEVTCVVVDVSHEDPEVKFNWYVDGVEVHNAKTKPREEQYNSTYRVVSVLTVLHQDWLNGKEYKCKVSNKALPAPIEKTISKAKGQPREPRVYTLPPCRDELTKNQVSLTCLVKGFYPSDIAVEWESNGQPENNYKTTPPVLVSDGSFTLYSKLTVDKSRWQQGNVFSCSVMHEALHNHYTQKSLSLSPG

SEQ ID NO: 49 - protein, 443 aa, Artificial Sequence
  Description of Artificial Sequence: Synthetic polypeptide
RNLPVATPDPGMFPCLHHSQNLLRAVSNMLQKARQTLEFYPCTSEEIDHVDITKDKTSTVEACLPLELTKNESCLNSRETSFITNGSCLASRKTSFMMALCLSSIYEDLKMYQVEFKTMNAKLLMDPKRQIFLDQNMLAVIDELMQALNFNSETVPQKSSLEEPDFYKTKIKLCILLHAFRIRAVTIDRVMSYLNASGGGGSGGGGSGGGGSEPKSSDKTHTCPPCPAPELLGGPSVFLFPPKPKDTLMISRTPEVTCVVVDVSHEDPEVKFNWYVDGVEVHNAKTKPREEQYNSTYRVVSVLTVLHQDWLNGKEYKCKVSNKALPAPIEKTISKAKGQPREPQVCTLPPSRDELTENQVSLTCLVKGFYPSDIAVEWESNGQPENNYKTTPPVLDSDGSFFLYSWLTVDKSRWQQGNVFSCSVMHEALHNHYTQKSLSLSPG

SEQ ID NO: 50 - protein, 537 aa, Artificial Sequence
  Description of Artificial Sequence: Synthetic polypeptide
IWELKKDVYVVELDWYPDAPGEMVVLTCDTPEEDGITWTLDQSSEVLGSGKTLTIRVKEFGDAGQYTCHKGGEVLSHSLLLLHKKEDGIWSTDILKDQKEPKNKTFLRCEAKNYSGRFTCWWLTTISTDLTFSVKSSRGSSDPQGVTCGAATLSAERVRGDNKEYEYSVECQEDSACPAAEESLPIEVMVDAVHKLKYENYTSSFFIRDIIKPDPPKNLQLKPLKNSRQVEVSWEYPDTWSTPHSYFSLTFCVQVQGKSKREKKDRVFTDKTSATVICRKNASISVRAQDRYYSSSWSEWASVPCSEPKSSDKTHTCPPCPAPELLGGPSVFLFPPKPKDTLMISRTPEVTCVVVDVSHEDPEVKFNWYVDGVEVHNAKTKPREEQYNSTYRVVSVLTVLHQDWLNGKEYKCKVSNKALPAPIEKTISKAKGQPREPRVYTLPPCRDELTKNQVSLTCLVKGFYPSDIAVEWESNGQPENNYKTTPPVLVSDGSFTLYSKLTVDKSRWQQGNVFSCSVMHEALHNHYTQKSLSLSPG

SEQ ID NO: 51 - protein, 542 aa, Artificial Sequence
  Description of Artificial Sequence: Synthetic polypeptide
IWELKKDVYVVELDWYPDAPGEMVVLTCDTPEEDGITWTLDQSSEVLGSGKTLTIRVKEFGDAGQYTCHKGGEVLSHSLLLLHKKEDGIWSTDILKDQKEPKNKTFLRCEAKNYSGRFTCWWLTTISTDLTFSVKSSRGSSDPQGVTCGAATLSAERVRGDNKEYEYSVECQEDSACPAAEESLPIEVMVDAVHKLKYENYTSSFFIRDIIKPDPPKNLQLKPLKNSRQVEVSWEYPDTWSTPHSYFSLTFCVQVQGKSKREKKDRVFTDKTSATVICRKNASISVRAQDRYYSSSWSEWASVPCSGGGGSEPKSSDKTHTCPPCPAPELLGGPSVFLFPPKPKDTLMISRTPEVTCVVVDVSHEDPEVKFNWYVDGVEVHNAKTKPREEQYNSTYRVVSVLTVLHQDWLNGKEYKCKVSNKALPAPIEKTISKAKGQPREPQVCTLPPSRDELTENQVSLTCLVKGFYPSDIAVEWESNGQPENNYKTTPPVLDSDGSFFLYSWLTVDKSRWQQGNVFSCSVMHEALHNHYTQKSLSLSPG

SEQ ID NO: 52 - protein, 433 aa, Artificial Sequence; identical to SEQ ID NO: 46
  Description of Artificial Sequence: Synthetic polypeptide

SEQ ID NO: 53 - protein, 542 aa, Artificial Sequence
  Description of Artificial Sequence: Synthetic polypeptide
IWELKKDVYVVELDWYPDAPGEMVVLTCDTPEEDGITWTLDQSSEVLGSGKTLTIRVKEFGDAGQYTCHKGGEVLSHSLLLLHKKEDGIWSTDILKDQKEPKNKTFLRCEAKNYSGRFTCWWLTTISTDLTFSVKSSRGSSDPQGVTCGAATLSAERVRGDNKEYEYSVECQEDSASPAAEESLPIEVMVDAVHKLKYENYTSSFFIRDIIKPDPPKNLQLKPLKNSRQVEVSWEYPDTWSTPHSYFSLTFCVQVQGKSKREKKDRVFTDKTSATVICRKNASISVRAQDRCYSSSWSEWASVPCSGGGGSEPKSSDKTHTCPPCPAPELLGGPSVFLFPPKPKDTLMISRTPEVTCVVVDVSHEDPEVKFNWYVDGVEVHNAKTKPREEQYNSTYRVVSVLTVLHQDWLNGKEYKCKVSNKALPAPIEKTISKAKGQPREPQVCTLPPSRDELTENQVSLTCLVKGFYPSDIAVEWESNGQPENNYKTTPPVLDSDGSFFLYSWLTVDKSRWQQGNVFSCSVMHEALHNHYTQKSLSLSPG

SEQ ID NO: 54 - protein, 433 aa, Artificial Sequence
  Description of Artificial Sequence: Synthetic polypeptide
RNLPVATPDPGMFPCLHHSQNLLRAVSNMLQKARQTLEFYPCTSEEIDHVDITKDKTSTVEACLPLELTKNESSLNSRETSFITNGSCLASRKTSFMMALCLSSIYEDLKMYQVEFKTMNAKLLMDPKRQIFLDQNMLAVIDELMQALNFNSETVPQKSSLEEPDFYKTKIKLCILLHAFRIRACTIDRVMSYLNASGGGGSEPKSSDKTHTCPPCPAPELLGGPSVFLFPPKPKDTLMISRTPEVTCVVVDVSHEDPEVKFNWYVDGVEVHNAKTKPREEQYNSTYRVVSVLTVLHQDWLNGKEYKCKVSNKALPAPIEKTISKAKGQPREPRVYTLPPCRDELTKNQVSLTCLVKGFYPSDIAVEWESNGQPENNYKTTPPVLVSDGSFTLYSKLTVDKSRWQQGNVFSCSVMHEALHNHYTQKSLSLSPG

SEQ ID NO: 55 - protein, 536 aa, Artificial Sequence
  Description of Artificial Sequence: Synthetic polypeptide
IWELKKDVYVVELDWYPDAPGEMVVLTCDTPEEDGITWTLDQSSEVLGSGKTLTIRVKEFGDAGQYTCHKGGEVLSHSLLLLHKKEDGIWSTDILKDQKEPKNKTFLRCEAKNYSGRFTCWWLTTISTDLTFSVKSSRGSSDPQGVTCGAATLSAERVRGDNKEYEYSVECQEDSACPAAEESLPIEVMVDAVHKLKYENYTSSFFIRDIIKPDPPKNLQLKPLKNSRQVEVSWEYPDTWSTPHSYFSLTFCVQVQGKSKREKKDRVFTDKTSATVICRKNASISVRAQDRCYSSSWSEWASVPCSRVESKYGPPCPPCPAPEFLGGPSVFLFPPKPKDTLMISRTPEVTCVVVDVSQEDPEVQFNWYVDGVEVHNAKTKPREEQFNSTYRVVSVLTVLHQDWLNGKEYKCKVSNKGLPSSIEKTISKAKGQPREPQVCTLPPSQEEMTKNQVSLTCLVEGFYPSDIAVEWESNGQPENNYKTTPPVLDSDGSFFLYSWLTVDKSRWQEGNVFSCSVMHEALHNHYTQKSLSLSLG

SEQ ID NO: 56 - protein, 442 aa, Artificial Sequence
  Description of Artificial Sequence: Synthetic polypeptide
RNLPVATPDPGMFPCLHHSQNLLRAVSNMLQKARQTLEFYPCTSEEIDHVDITKDKTSTVEACLPLELTKNESCLNSRETSFITNGSCLASRKTSFMMALCLSSIYEDLKMYQVEFKTMNAKLLMDPKRQIFLDQNMLAVIDELMQALNFNSETVPQKSSLEEPDFYKTKIKLCILLHAFRIRACTIDRVMSYLNASGGGGSGGGGSGGGGSRVESKYGPPCPPCPAPEFLGGPSVFLFPPKPKDTLMISRTPEVTCVVVDVSQEDPEVQFNWYVDGVEVHNAKTKPREEQFNSTYRVVSVLTVLHQDWLNGKEYKCKVSNKGLPSSIEKTISKAKGQPREPQVYTLPPCQENMTKNQVSLTCLVKGFYPSDIAVEWESNGQPENNYKTTPPVLVSDGSFTLYSRLTVDKSRWQEGNVFSCSVMHEALHNHYTQKSLSLSLG

SEQ ID NO: 57 - protein, 537 aa, Artificial Sequence
  Description of Artificial Sequence: Synthetic polypeptide
IWELKKDVYVVELDWYPDAPGEMVVLTCDTPEEDGITWTLDQSSEVLGSGKTLTIRVKEFGDAGQYTCHKGGEVLSHSLLLLHKKEDGIWSTDILKDQKEPKNKTFLRCEAKNYSGRFTCWWLTTISTDLTFSVKSSRGSSDPQGVTCGAATLSAERVRGDNKEYEYSVECQEDSACPAAEESLPIEVMVDAVHKLKYENYTSSFFIRDIIKPDPPKNLQLKPLKNSRQVEVSWEYPDTWSTPHSYFSLTFCVQVQGKSKREKKDRVFTDKTSATVICRKNASISVRAQDRCYSSSWSEWASVPCSEPKSSDKTHTCPPCPAPEAAGGPSVFLFPPKPKDTLMISRTPEVTCVVVDVSHEDPEVKFNWYVDGVEVHNAKTKPREEQYNSTYRVVSVLTVLHQDWLNGKEYKCKVSNKALPAPIEKTISKAKGQPREPQVCTLPPSRDELTENQVSLTCLVKGFYPSDIAVEWESNGQPENNYKTTPPVLDSDGSFFLYSWLTVDKSRWQQGNVFSCSVMHEALHNHYTQKSLSLSPG

SEQ ID NO: 58 - protein, 443 aa, Artificial Sequence
  Description of Artificial Sequence: Synthetic polypeptide
RNLPVATPDPGMFPCLHHSQNLLRAVSNMLQKARQTLEFYPCTSEEIDHVDITKDKTSTVEACLPLELTKNESCLNSRETSFITNGSCLASRKTSFMMALCLSSIYEDLKMYQVEFKTMNAKLLMDPKRQIFLDQNMLAVIDELMQALNFNSETVPQKSSLEEPDFYKTKIKLCILLHAFRIRACTIDRVMSYLNASGGGGSGGGGSGGGGSEPKSSDKTHTCPPCPAPEAAGGPSVFLFPPKPKDTLMISRTPEVTCVVVDVSHEDPEVKFNWYVDGVEVHNAKTKPREEQYNSTYRVVSVLTVLHQDWLNGKEYKCKVSNKALPAPIEKTISKAKGQPREPRVYTLPPCRDELTKNQVSLTCLVKGFYPSDIAVEWESNGQPENNYKTTPPVLVSDGSFTLYSKLTVDKSRWQQGNVFSCSVMHEALHNHYTQKSLSLSPG

SEQ ID NO: 59 - protein, 537 aa, Artificial Sequence
  Description of Artificial Sequence: Synthetic polypeptide
IWELKKDVYVVELDWYPDAPGEMVVLTCDTPEEDGITWTLDQSSEVLGSGKTLTIRVKEFGDAGQYTCHKGGEVLSHSLLLLHKKEDGIWSTDILKDQKEPKNKTFLRCEAKNYSGRFTCWWLTTISTDLTFSVKSSRGSSDPQGVTCGAATLSAERVRGDNKEYEYSVECQEDSACPAAEESLPIEVMVDAVHKLKYENYTSSFFIRDIIKPDPPKNLQLKPLKNSRQVEVSWEYPDTWSTPHSYFSLTFCVQVQGKSKREKKDRVFTDKTSATVICRKNASISVRAQDRCYSSSWSEWASVPCSEPKSSDKTHTCPPCPAPEAAGGPSVFLFPPKPKDTLMISRTPEVTCVVVDVSHEDPEVKFNWYVDGVEVHNAKTKPREEQYNSTYRVVSVLTVLHQDWLNGKEYKCKVSNKALAAPIEKTISKAKGQPREPQVCTLPPSRDELTENQVSLTCLVKGFYPSDIAVEWESNGQPENNYKTTPPVLDSDGSFFLYSWLTVDKSRWQQGNVFSCSVMHEALHNHYTQKSLSLSPG

SEQ ID NO: 60 - protein, 443 aa, Artificial Sequence
  Description of Artificial Sequence: Synthetic polypeptide
RNLPVATPDPGMFPCLHHSQNLLRAVSNMLQKARQTLEFYPCTSEEIDHVDITKDKTSTVEACLPLELTKNESCLNSRETSFITNGSCLASRKTSFMMALCLSSIYEDLKMYQVEFKTMNAKLLMDPKRQIFLDQNMLAVIDELMQALNFNSETVPQKSSLEEPDFYKTKIKLCILLHAFRIRACTIDRVMSYLNASGGGGSGGGGSGGGGSEPKSSDKTHTCPPCPAPEAAGGPSVFLFPPKPKDTLMISRTPEVTCVVVDVSHEDPEVKFNWYVDGVEVHNAKTKPREEQYNSTYRVVSVLTVLHQDWLNGKEYKCKVSNKALAAPIEKTISKAKGQPREPRVYTLPPCRDELTKNQVSLTCLVKGFYPSDIAVEWESNGQPENNYKTTPPVLVSDGSFTLYSKLTVDKSRWQQGNVFSCSVMHEALHNHYTQKSLSLSPG

SEQ ID NO: 61 - protein, 537 aa, Artificial Sequence
  Description of Artificial Sequence: Synthetic polypeptide
IWELKKDVYVVELDWYPDAPGEMVVLTCDTPEEDGITWTLDQSSEVLGSGKTLTIRVKEFGDAGQYTCHKGGEVLSHSLLLLHKKEDGIWSTDILKDQKEPKNKTFLRCEAKNYSGRFTCWWLTTISTDLTFSVKSSRGSSDPQGVTCGAATLSAERVRGDNKEYEYSVECQEDSACPAAEESLPIEVMVDAVHKLKYENYTSSFFIRDIIKPDPPKNLQLKPLKNSRQVEVSWEYPDTWSTPHSYFSLTFCVQVQGKSKREKKDRVFTDKTSATVICRKNASISVRAQDRCYSSSWSEWASVPCSEPKSSDKTHTCPPCPAPEAEGAPSVFLFPPKPKDTLMISRTPEVTCVVVDVSHEDPEVKFNWYVDGVEVHNAKTKPREEQYNSTYRVVSVLTVLHQDWLNGKEYKCKVSNKALPSSIEKTISKAKGQPREPQVCTLPPSRDELTENQVSLTCLVKGFYPSDIAVEWESNGQPENNYKTTPPVLDSDGSFFLYSWLTVDKSRWQQGNVFSCSVMHEALHNHYTQKSLSLSPG

SEQ ID NO: 62 - protein, 443 aa, Artificial Sequence
  Description of Artificial Sequence: Synthetic polypeptide
RNLPVATPDPGMFPCLHHSQNLLRAVSNMLQKARQTLEFYPCTSEEIDHVDITKDKTSTVEACLPLELTKNESCLNSRETSFITNGSCLASRKTSFMMALCLSSIYEDLKMYQVEFKTMNAKLLMDPKRQIFLDQNMLAVIDELMQALNFNSETVPQKSSLEEPDFYKTKIKLCILLHAFRIRACTIDRVMSYLNASGGGGSGGGGSGGGGSEPKSSDKTHTCPPCPAPEAEGAPSVFLFPPKPKDTLMISRTPEVTCVVVDVSHEDPEVKFNWYVDGVEVHNAKTKPREEQYNSTYRVVSVLTVLHQDWLNGKEYKCKVSNKALPSSIEKTISKAKGQPREPRVYTLPPCRDELTKNQVSLTCLVKGFYPSDIAVEWESNGQPENNYKTTPPVLVSDGSFTLYSKLTVDKSRWQQGNVFSCSVMHEALHNHYTQKSLSLSPG

SEQ ID NO: 63 - protein, 26 aa, Artificial Sequence
  Description of Artificial Sequence: Synthetic peptide
GGGGSRVESKYGPPCPPCPAPEFEGG

SEQ ID NO: 64 - protein, 31 aa, Artificial Sequence
  Description of Artificial Sequence: Synthetic polypeptide
GGGGSGGGGSRVESKYGPPCPPCPAPEFEGG

SEQ ID NO: 65 - protein, 27 aa, Artificial Sequence
  Description of Artificial Sequence: Synthetic peptide
GGGGSEPKSSDKTHTCPPCPAPEAAGG

SEQ ID NO: 66 - protein, 32 aa, Artificial Sequence
  Description of Artificial Sequence: Synthetic polypeptide
GGGGSGGGGSEPKSSDKTHTCPPCPAPEAAGG

SEQ ID NO: 67 - protein, 27 aa, Artificial Sequence
  Description of Artificial Sequence: Synthetic peptide
GGGGSEPKSSDKTHTCPPCPAPEAEGA

SEQ ID NO: 68 - protein, 32 aa, Artificial Sequence
  Description of Artificial Sequence: Synthetic polypeptide
GGGGSGGGGSEPKSSDKTHTCPPCPAPEAEGA

SEQ ID NO: 69 - protein, 536 aa, Artificial Sequence
  Description of Artificial Sequence: Synthetic polypeptide
IWELKKDVYVVELDWYPDAPGEMVVLTCDTPEEDGITWTLDQSSEVLGSGKTLTIRVKEFGDAGQYTCHKGGEVLSHSLLLLHKKEDGIWSTDILKDQKEPKNKTFLRCEAKNYSGRFTCWWLTTISTDLTFSVKSSRGSSDPQGVTCGAATLSAERVRGDNKEYEYSVECQEDSASPAAEESLPIEVMVDAVHKLKYENYTSSFFIRDIIKPDPPKNLQLKPLKNSRQVEVSWEYPDTWSTPHSYFSLTFCVQVQGKSKREKKDRVFTDKTSATVICRKNASISVRAQDRCYSSSWSEWASVPCSRVESKYGPPCPPCPAPEFLGGPSVFLFPPKPKDTLMISRTPEVTCVVVDVSQEDPEVQFNWYVDGVEVHNAKTKPREEQFNSTYRVVSVLTVLHQDWLNGKEYKCKVSNKGLPSSIEKTISKAKGQPREPQVCTLPPSQEEMTKNQVSLTCLVEGFYPSDIAVEWESNGQPENNYKTTPPVLDSDGSFFLYSWLTVDKSRWQEGNVFSCSVMHEALHNHYTQKSLSLSLG

SEQ ID NO: 70 - protein, 442 aa, Artificial Sequence
  Description of Artificial Sequence: Synthetic polypeptide
RNLPVATPDPGMFPCLHHSQNLLRAVSNMLQKARQTLEFYPCTSEEIDHVDITKDKTSTVEACLPLELTKNESSLNSRETSFITNGSCLASRKTSFMMALCLSSIYEDLKMYQVEFKTMNAKLLMDPKRQIFLDQNMLAVIDELMQALNFNSETVPQKSSLEEPDFYKTKIKLCILLHAFRIRACTIDRVMSYLNASGGGGSGGGGSGGGGSRVESKYGPPCPPCPAPEFLGGPSVFLFPPKPKDTLMISRTPEVTCVVVDVSQEDPEVQFNWYVDGVEVHNAKTKPREEQFNSTYRVVSVLTVLHQDWLNGKEYKCKVSNKGLPSSIEKTISKAKGQPREPQVYTLPPCQENMTKNQVSLTCLVKGFYPSDIAVEWESNGQPENNYKTTPPVLVSDGSFTLYSRLTVDKSRWQEGNVFSCSVMHEALHNHYTQKSLSLSLG

SEQ ID NO: 71 - protein, 536 aa, Artificial Sequence
  Description of Artificial Sequence: Synthetic polypeptide
IWELKKDVYVVELDWYPDAPGEMVVLTCDTPEEDGITWTLDQSSEVLGSGKTLTIRVKEFGDAGQYTCHKGGEVLSHSLLLLHKKEDGIWSTDILKDQKEPKNKTFLRCEAKNYSGRFTCWWLTTISTDLTFSVKSSRGSSDPQGVTCGAATLSAERVRGDNKEYEYSVECQEDSASPAAEESLPIEVMVDAVHKLKYENYTSSFFIRDIIKPDPPKNLQLKPLKNSRQVEVSWEYPDTWSTPHSYFSLTFCVQVQGKSKREKKDRVFTDKTSATVICRKNASISVRAQDRCYSSSWSEWASVPCSRVESKYGPPCPPCPAPEFLGGPSVFLFPPKPKDTLMISRTPEVTCVVVDVSQEDPEVQFNWYVDGVEVHNAKTKPREEQFNSTYRVVSVLTVLHQDWLNGKEYKCKVSNKGLPSSIEKTISKAKGQPREPQVCTLPPSQEEMTENQVSLTCLVKGFYPSDIAVEWESNGQPENNYKTTPPVLDSDGSFFLYSWLTVDKSRWQEGNVFSCSVMHEALHNHYTQKSLSLSLG

SEQ ID NO: 72 - protein, 442 aa, Artificial Sequence
  Description of Artificial Sequence: Synthetic polypeptide
RNLPVATPDPGMFPCLHHSQNLLRAVSNMLQKARQTLEFYPCTSEEIDHVDITKDKTSTVEACLPLELTKNESSLNSRETSFITNGSCLASRKTSFMMALCLSSIYEDLKMYQVEFKTMNAKLLMDPKRQIFLDQNMLAVIDELMQALNFNSETVPQKSSLEEPDFYKTKIKLCILLHAFRIRACTIDRVMSYLNASGGGGSGGGGSGGGGSRVESKYGPPCPPCPAPEFLGGPSVFLFPPKPKDTLMISRTPEVTCVVVDVSQEDPEVQFNWYVDGVEVHNAKTKPREEQFNSTYRVVSVLTVLHQDWLNGKEYKCKVSNKGLPSSIEKTISKAKGQPREPRVYTLPPCQEEMTKNQVSLTCLVKGFYPSDIAVEWESNGQPENNYKTTPPVLVSDGSFTLYSRLTVDKSRWQEGNVFSCSVMHEALHNHYTQKSLSLSLG

SEQ ID NO: 73 - protein, 536 aa, Artificial Sequence
  Description of Artificial Sequence: Synthetic polypeptide
IWELKKDVYVVELDWYPDAPGEMVVLTCDTPEEDGITWTLDQSSEVLGSGKTLTIRVKEFGDAGQYTCHKGGEVLSHSLLLLHKKEDGIWSTDILKDQKEPKNKTFLRCEAKNYSGRFTCWWLTTISTDLTFSVKSSRGSSDPQGVTCGAATLSAERVRGDNKEYEYSVECQEDSASPAAEESLPIEVMVDAVHKLKYENYTSSFFIRDIIKPDPPKNLQLKPLKNSRQVEVSWEYPDTWSTPHSYFSLTFCVQVQGKSKREKKDRVFTDKTSATVICRKNASISVRAQDRCYSSSWSEWASVPCSRVESKYGPPCPPCPAPEFEGGPSVFLFPPKPKDTLMISRTPEVTCVVVDVSQEDPEVQFNWYVDGVEVHNAKTKPREEQFNSTYRVVSVLTVLHQDWLNGKEYKCKVSNKGLPSSIEKTISKAKGQPREPQVCTLPPSQEEMTENQVSLTCLVKGFYPSDIAVEWESNGQPENNYKTTPPVLDSDGSFFLYSWLTVDKSRWQEGNVFSCSVMHEALHNHYTQKSLSLSLG

SEQ ID NO: 74 - protein, 442 aa, Artificial Sequence
  Description of Artificial Sequence: Synthetic polypeptide
RNLPVATPDPGMFPCLHHSQNLLRAVSNMLQKARQTLEFYPCTSEEIDHVDITKDKTSTVEACLPLELTKNESSLNSRETSFITNGSCLASRKTSFMMALCLSSIYEDLKMYQVEFKTMNAKLLMDPKRQIFLDQNMLAVIDELMQALNFNSETVPQKSSLEEPDFYKTKIKLCILLHAFRIRACTIDRVMSYLNASGGGGSGGGGSGGGGSRVESKYGPPCPPCPAPEFEGGPSVFLFPPKPKDTLMISRTPEVTCVVVDVSQEDPEVQFNWYVDGVEVHNAKTKPREEQFNSTYRVVSVLTVLHQDWLNGKEYKCKVSNKGLPSSIEKTISKAKGQPREPRVYTLPPCQEEMTKNQVSLTCLVKGFYPSDIAVEWESNGQPENNYKTTPPVLVSDGSFTLYSRLTVDKSRWQEGNVFSCSVMHEALHNHYTQKSLSLSLG

SEQ ID NO: 75 - protein, 536 aa, Artificial Sequence
  Description of Artificial Sequence: Synthetic polypeptide
IWELKKDVYVVELDWYPDAPGEMVVLTCDTPEEDGITWTLDQSSEVLGSGKTLTIRVKEFGDAGQYTCHKGGEVLSHSLLLLHKKEDGIWSTDILKDQKEPKNKTFLRCEAKNYSGRFTCWWLTTISTDLTFSVKSSRGSSDPQGVTCGAATLSAERVRGDNKEYEYSVECQEDSASPAAEESLPIEVMVDAVHKLKYENYTSSFFIRDIIKPDPPKNLQLKPLKNSRQVEVSWEYPDTWSTPHSYFSLTFCVQVQGKSKREKKDRVFTDKTSATVICRKNASISVRAQDRCYSSSWSEWASVPCSRVESKYGPPCPPCPAPEFEGGPSVFLFPPKPKDTLMISRTPEVTCVVVDVSQEDPEVQFNWYVDGVEVHNAKTKPREEQFNSTYRVVSVLTVLHQDWLNGKEYKCKVSNKGLASSIEKTISKAKGQPREPQVCTLPPSQEEMTENQVSLTCLVKGFYPSDIAVEWESNGQPENNYKTTPPVLDSDGSFFLYSWLTVDKSRWQEGNVFSCSVMHEALHNHYTQKSLSLSLG

SEQ ID NO: 76 - protein, 442 aa, Artificial Sequence
  Description of Artificial Sequence: Synthetic polypeptide
RNLPVATPDPGMFPCLHHSQNLLRAVSNMLQKARQTLEFYPCTSEEIDHVDITKDKTSTVEACLPLELTKNESSLNSRETSFITNGSCLASRKTSFMMALCLSSIYEDLKMYQVEFKTMNAKLLMDPKRQIFLDQNMLAVIDELMQALNFNSETVPQKSSLEEPDFYKTKIKLCILLHAFRIRACTIDRVMSYLNASGGGGSGGGGSGGGGSRVESKYGPPCPPCPAPEFEGGPSVFLFPPKPKDTLMISRTPEVTCVVVDVSQEDPEVQFNWYVDGVEVHNAKTKPREEQFNSTYRVVSVLTVLHQDWLNGKEYKCKVSNKGLASSIEKTISKAKGQPREPRVYTLPPCQEEMTKNQVSLTCLVKGFYPSDIAVEWESNGQPENNYKTTPPVLVSDGSFTLYSRLTVDKSRWQEGNVFSCSVMHEALHNHYTQKSLSLSLG

SEQ ID NO: 77 - protein, 536 aa, Artificial Sequence
  Description of Artificial Sequence: Synthetic polypeptide
IWELKKDVYVVELDWYPDAPGEMVVLTCDTPEEDGITWTLDQSSEVLGSGKTLTIRVKEFGDAGQYTCHKGGEVLSHSLLLLHKKEDGIWSTDILKDQKEPKNKTFLRCEAKNYSGRFTCWWLTTISTDLTFSVKSSRGSSDPQGVTCGAATLSAERVRGDNKEYEYSVECQEDSASPAAEESLPIEVMVDAVHKLKYENYTSSFFIRDIIKPDPPKNLQLKPLKNSRQVEVSWEYPDTWSTPHSYFSLTFCVQVQGKSKREKKDRVFTDKTSATVICRKNASISVRAQDRCYSSSWSEWASVPCSRVESKYGPPCPPCPAPEFEGGPSVFLFPPKPKDTLMISRTPEVTCVVVDVSQEDPEVQFNWYVDGVEVHNAKTKPREEQFNSTYRVVSVLTVLHQDWLNGKEYKCKVSNKGLGSSIEKTISKAKGQPREPQVCTLPPSQEEMTENQVSLTCLVKGFYPSDIAVEWESNGQPENNYKTTPPVLDSDGSFFLYSWLTVDKSRWQEGNVFSCSVMHEALHNHYTQKSLSLSLG

SEQ ID NO: 78 - protein, 442 aa, Artificial Sequence
  Description of Artificial Sequence: Synthetic polypeptide
RNLPVATPDPGMFPCLHHSQNLLRAVSNMLQKARQTLEFYPCTSEEIDHVDITKDKTSTVEACLPLELTKNESSLNSRETSFITNGSCLASRKTSFMMALCLSSIYEDLKMYQVEFKTMNAKLLMDPKRQIFLDQNMLAVIDELMQALNFNSETVPQKSSLEEPDFYKTKIKLCILLHAFRIRACTIDRVMSYLNASGGGGSGGGGSGGGGSRVESKYGPPCPPCPAPEFEGGPSVFLFPPKPKDTLMISRTPEVTCVVVDVSQEDPEVQFNWYVDGVEVHNAKTKPREEQFNSTYRVVSVLTVLHQDWLNGKEYKCKVSNKGLGSSIEKTISKAKGQPREPRVYTLPPCQEEMTKNQVSLTCLVKGFYPSDIAVEWESNGQPENNYKTTPPVLVSDGSFTLYSRLTVDKSRWQEGNVFSCSVMHEALHNHYTQKSLSLSLG

SEQ ID NO: 79 - protein, 537 aa, Artificial Sequence
  Description of Artificial Sequence: Synthetic polypeptide
IWELKKDVYVVELDWYPDAPGEMVVLTCDTPEEDGITWTLDQSSEVLGSGKTLTIRVKEFGDAGQYTCHKGGEVLSHSLLLLHKKEDGIWSTDILKDQKEPKNKTFLRCEAKNYSGRFTCWWLTTISTDLTFSVKSSRGSSDPQGVTCGAATLSAERVRGDNKEYEYSVECQEDSASPAAEESLPIEVMVDAVHKLKYENYTSSFFIRDIIKPDPPKNLQLKPLKNSRQVEVSWEYPDTWSTPHSYFSLTFCVQVQGKSKREKKDRVFTDKTSATVICRKNASISVRAQDRCYSSSWSEWASVPCSEPKSSDKTHTCPPCPAPELLGGPSVFLFPPKPKDTLMISRTPEVTCVVVDVSHEDPEVKFNWYVDGVEVHNAKTKPREEQYNSTYRVVSVLTVLHQDWLNGKEYKCKVSNKALPAPIEKTISKAKGQPREPQVCTLPPSRDELTENQVSLTCLVKGFYPSDIAVEWESNGQPENNYKTTPPVLDSDGSFFLYSWLTVDKSRWQQGNVFSCSVMHEALHNHYTQKSLSLSPG

SEQ ID NO: 80 - protein, 443 aa, Artificial Sequence
  Description of Artificial Sequence: Synthetic polypeptide
RNLPVATPDPGMFPCLHHSQNLLRAVSNMLQKARQTLEFYPCTSEEIDHVDITKDKTSTVEACLPLELTKNESSLNSRETSFITNGSCLASRKTSFMMALCLSSIYEDLKMYQVEFKTMNAKLLMDPKRQIFLDQNMLAVIDELMQALNFNSETVPQKSSLEEPDFYKTKIKLCILLHAFRIRACTIDRVMSYLNASGGGGSGGGGSGGGGSEPKSSDKTHTCPPCPAPELLGGPSVFLFPPKPKDTLMISRTPEVTCVVVDVSHEDPEVKFNWYVDGVEVHNAKTKPREEQYNSTYRVVSVLTVLHQDWLNGKEYKCKVSNKALPAPIEKTISKAKGQPREPRVYTLPPCRDELTKNQVSLTCLVKGFYPSDIAVEWESNGQPENNYKTTPPVLVSDGSFTLYSKLTVDKSRWQQGNVFSCSVMHEALHNHYTQKSLSLSPG

SEQ ID NO: 81 - protein, 537 aa, Artificial Sequence
  Description of Artificial Sequence: Synthetic polypeptide
IWELKKDVYVVELDWYPDAPGEMVVLTCDTPEEDGITWTLDQSSEVLGSGKTLTIRVKEFGDAGQYTCHKGGEVLSHSLLLLHKKEDGIWSTDILKDQKEPKNKTFLRCEAKNYSGRFTCWWLTTISTDLTFSVKSSRGSSDPQGVTCGAATLSAERVRGDNKEYEYSVECQEDSASPAAEESLPIEVMVDAVHKLKYENYTSSFFIRDIIKPDPPKNLQLKPLKNSRQVEVSWEYPDTWSTPHSYFSLTFCVQVQGKSKREKKDRVFTDKTSATVICRKNASISVRAQDRCYSSSWSEWASVPCSEPKSSDKTHTCPPCPAPEAAGGPSVFLFPPKPKDTLMISRTPEVTCVVVDVSHEDPEVKFNWYVDGVEVHNAKTKPREEQYNSTYRVVSVLTVLHQDWLNGKEYKCKVSNKALPAPIEKTISKAKGQPREPQVCTLPPSRDELTENQVSLTCLVKGFYPSDIAVEWESNGQPENNYKTTPPVLDSDGSFFLYSWLTVDKSRWQQGNVFSCSVMHEALHNHYTQKSLSLSPG

SEQ ID NO: 82 - protein, 443 aa, Artificial Sequence
  Description of Artificial Sequence: Synthetic polypeptide
RNLPVATPDPGMFPCLHHSQNLLRAVSNMLQKARQTLEFYPCTSEEIDHVDITKDKTSTVEACLPLELTKNESSLNSRETSFITNGSCLASRKTSFMMALCLSSIYEDLKMYQVEFKTMNAKLLMDPKRQIFLDQNMLAVIDELMQALNFNSETVPQKSSLEEPDFYKTKIKLCILLHAFRIRACTIDRVMSYLNASGGGGSGGGGSGGGGSEPKSSDKTHTCPPCPAPEAAGGPSVFLFPPKPKDTLMISRTPEVTCVVVDVSHEDPEVKFNWYVDGVEVHNAKTKPREEQYNSTYRVVSVLTVLHQDWLNGKEYKCKVSNKALPAPIEKTISKAKGQPREPRVYTLPPCRDELTKNQVSLTCLVKGFYPSDIAVEWESNGQPENNYKTTPPVLVSDGSFTLYSKLTVDKSRWQQGNVFSCSVMHEALHNHYTQKSLSLSPG

SEQ ID NO: 83 - protein, 537 aa, Artificial Sequence
  Description of Artificial Sequence: Synthetic polypeptide
IWELKKDVYVVELDWYPDAPGEMVVLTCDTPEEDGITWTLDQSSEVLGSGKTLTIRVKEFGDAGQYTCHKGGEVLSHSLLLLHKKEDGIWSTDILKDQKEPKNKTFLRCEAKNYSGRFTCWWLTTISTDLTFSVKSSRGSSDPQGVTCGAATLSAERVRGDNKEYEYSVECQEDSASPAAEESLPIEVMVDAVHKLKYENYTSSFFIRDIIKPDPPKNLQLKPLKNSRQVEVSWEYPDTWSTPHSYFSLTFCVQVQGKSKREKKDRVFTDKTSATVICRKNASISVRAQDRCYSSSWSEWASVPCSEPKSSDKTHTCPPCPAPEAAGGPSVFLFPPKPKDTLMISRTPEVTCVVVDVSHEDPEVKFNWYVDGVEVHNAKTKPREEQYNSTYRVVSVLTVLHQDWLNGKEYKCKVSNKALAAPIEKTISKAKGQPREPQVCTLPPSRDELTENQVSLTCLVKGFYPSDIAVEWESNGQPENNYKTTPPVLDSDGSFFLYSWLTVDKSRWQQGNVFSCSVMHEALHNHYTQKSLSLSPG

SEQ ID NO: 84 - protein, 443 aa, Artificial Sequence
  Description of Artificial Sequence: Synthetic polypeptide
RNLPVATPDPGMFPCLHHSQNLLRAVSNMLQKARQTLEFYPCTSEEIDHVDITKDKTSTVEACLPLELTKNESSLNSRETSFITNGSCLASRKTSFMMALCLSSIYEDLKMYQVEFKTMNAKLLMDPKRQIFLDQNMLAVIDELMQALNFNSETVPQKSSLEEPDFYKTKIKLCILLHAFRIRACTIDRVMSYLNASGGGGSGGGGSGGGGSEPKSSDKTHTCPPCPAPEAAGGPSVFLFPPKPKDTLMISRTPEVTCVVVDVSHEDPEVKFNWYVDGVEVHNAKTKPREEQYNSTYRVVSVLTVLHQDWLNGKEYKCKVSNKALAAPIEKTISKAKGQPREPRVYTLPPCRDELTKNQVSLTCLVKGFYPSDIAVEWESNGQPENNYKTTPPVLVSDGSFTLYSKLTVDKSRWQQGNVFSCSVMHEALHNHYTQKSLSLSPG

SEQ ID NO: 85 - protein, 537 aa, Artificial Sequence
  Description of Artificial Sequence: Synthetic polypeptide
IWELKKDVYVVELDWYPDAPGEMVVLTCDTPEEDGITWTLDQSSEVLGSGKTLTIRVKEFGDAGQYTCHKGGEVLSHSLLLLHKKEDGIWSTDILKDQKEPKNKTFLRCEAKNYSGRFTCWWLTTISTDLTFSVKSSRGSSDPQGVTCGAATLSAERVRGDNKEYEYSVECQEDSASPAAEESLPIEVMVDAVHKLKYENYTSSFFIRDIIKPDPPKNLQLKPLKNSRQVEVSWEYPDTWSTPHSYFSLTFCVQVQGKSKREKKDRVFTDKTSATVICRKNASISVRAQDRCYSSSWSEWASVPCSEPKSSDKTHTCPPCPAPEAAGGPSVFLFPPKPKDTLMISRTPEVTCVVVDVSHEDPEVKFNWYVDGVEVHNAKTKPREEQYNSTYRVVSVLTVLHQDWLNGKEYKCKVSNKALGAPIEKTISKAKGQPREPQVCTLPPSRDELTENQVSLTCLVKGFYPSDIAVEWESNGQPENNYKTTPPVLDSDGSFFLYSWLTVDKSRWQQGNVFSCSVMHEALHNHYTQKSLSLSPG

SEQ ID NO: 86 - protein, 443 aa, Artificial Sequence
  Description of Artificial Sequence: Synthetic polypeptide
RNLPVATPDPGMFPCLHHSQNLLRAVSNMLQKARQTLEFYPCTSEEIDHVDITKDKTSTVEACLPLELTKNESSLNSRETSFITNGSCLASRKTSFMMALCLSSIYEDLKMYQVEFKTMNAKLLMDPKRQIFLDQNMLAVIDELMQALNFNSETVPQKSSLEEPDFYKTKIKLCILLHAFRIRACTIDRVMSYLNASGGGGSGGGGSGGGGSEPKSSDKTHTCPPCPAPEAAGGPSVFLFPPKPKDTLMISRTPEVTCVVVDVSHEDPEVKFNWYVDGVEVHNAKTKPREEQYNSTYRVVSVLTVLHQDWLNGKEYKCKVSNKALGAPIEKTISKAKGQPREPRVYTLPPCRDELTKNQVSLTCLVKGFYPSDIAVEWESNGQPENNYKTTPPVLVSDGSFTLYSKLTVDKSRWQQGNVFSCSVMHEALHNHYTQKSLSLSPG

SEQ ID NO: 87 - protein, 537 aa, Artificial Sequence
  Description of Artificial Sequence: Synthetic polypeptide
IWELKKDVYVVELDWYPDAPGEMVVLTCDTPEEDGITWTLDQSSEVLGSGKTLTIRVKEFGDAGQYTCHKGGEVLSHSLLLLHKKEDGIWSTDILKDQKEPKNKTFLRCEAKNYSGRFTCWWLTTISTDLTFSVKSSRGSSDPQGVTCGAATLSAERVRGDNKEYEYSVECQEDSASPAAEESLPIEVMVDAVHKLKYENYTSSFFIRDIIKPDPPKNLQLKPLKNSRQVEVSWEYPDTWSTPHSYFSLTFCVQVQGKSKREKKDRVFTDKTSATVICRKNASISVRAQDRCYSSSWSEWASVPCSEPKSSDKTHTCPPCPAPEAEGAPSVFLFPPKPKDTLMISRTPEVTCVVVDVSHEDPEVKFNWYVDGVEVHNAKTKPREEQYNSTYRVVSVLTVLHQDWLNGKEYKCKVSNKALPSSIEKTISKAKGQPREPQVCTLPPSRDELTENQVSLTCLVKGFYPSDIAVEWESNGQPENNYKTTPPVLDSDGSFFLYSWLTVDKSRWQQGNVFSCSVMHEALHNHYTQKSLSLSPG

SEQ ID NO: 88 - protein, 443 aa, Artificial Sequence
  Description of Artificial Sequence: Synthetic polypeptide
RNLPVATPDPGMFPCLHHSQNLLRAVSNMLQKARQTLEFYPCTSEEIDHVDITKDKTSTVEACLPLELTKNESSLNSRETSFITNGSCLASRKTSFMMALCLSSIYEDLKMYQVEFKTMNAKLLMDPKRQIFLDQNMLAVIDELMQALNFNSETVPQKSSLEEPDFYKTKIKLCILLHAFRIRACTIDRVMSYLNASGGGGSGGGGSGGGGSEPKSSDKTHTCPPCPAPEAEGAPSVFLFPPKPKDTLMISRTPEVTCVVVDVSHEDPEVKFNWYVDGVEVHNAKTKPREEQYNSTYRVVSVLTVLHQDWLNGKEYKCKVSNKALPSSIEKTISKAKGQPREPRVYTLPPCRDELTKNQVSLTCLVKGFYPSDIAVEWESNGQPENNYKTTPPVLVSDGSFTLYSKLTVDKSRWQQGNVFSCSVMHEALHNHYTQKSLSLSPG

SEQ ID NO: 89 - protein, 536 aa, Artificial Sequence
  Description of Artificial Sequence: Synthetic polypeptide
IWELKKDVYVVELDWYPDAPGEMVVLTCDTPEEDGITWTLDQSSEVLGSGKTLTIRVKEFGDAGQYTCHKGGEVLSHSLLLLHKKEDGIWSTDILKDQKEPKNKTFLRCEAKNYSGRFTCWWLTTISTDLTFSVKSSRGSSDPQGVTCGAATLSAERVRGDNKEYEYSVECQEDSACPAAEESLPIEVMVDAVHKLKYENYTSSFFIRDIIKPDPPKNLQLKPLKNSRQVEVSWEYPDTWSTPHSYFSLTFCVQVQGKSKREKKDRVFTDKTSATVICRKNASISVRAQDRCYSSSWSEWASVPCSRVESKYGPPCPPCPAPEFLGGPSVFLFPPKPKDTLMISRTPEVTCVVVDVSQEDPEVQFNWYVDGVEVHNAKTKPREEQFNSTYRVVSVLTVLHQDWLNGKEYKCKVSNKGLPSSIEKTISKAKGQPREPQVCTLPPSQEEMTENQVSLTCLVKGFYPSDIAVEWESNGQPENNYKTTPPVLDSDGSFFLYSWLTVDKSRWQEGNVFSCSVMHEALHNHYTQKSLSLSLG

SEQ ID NO: 90 - protein, 442 aa, Artificial Sequence
  Description of Artificial Sequence: Synthetic polypeptide
RNLPVATPDPGMFPCLHHSQNLLRAVSNMLQKARQTLEFYPCTSEEIDHVDITKDKTSTVEACLPLELTKNESCLNSRETSFITNGSCLASRKTSFMMALCLSSIYEDLKMYQVEFKTMNAKLLMDPKRQIFLDQNMLAVIDELMQALNFNSETVPQKSSLEEPDFYKTKIKLCILLHAFRIRACTIDRVMSYLNASGGGGSGGGGSGGGGSRVESKYGPPCPPCPAPEFLGGPSVFLFPPKPKDTLMISRTPEVTCVVVDVSQEDPEVQFNWYVDGVEVHNAKTKPREEQFNSTYRVVSVLTVLHQDWLNGKEYKCKVSNKGLPSSIEKTISKAKGQPREPRVYTLPPCQEEMTKNQVSLTCLVKGFYPSDIAVEWESNGQPENNYKTTPPVLVSDGSFTLYSRLTVDKSRWQEGNVFSCSVMHEALHNHYTQKSLSLSLG

SEQ ID NO: 91 - protein, 536 aa, Artificial Sequence
  Description of Artificial Sequence: Synthetic polypeptide
IWELKKDVYVVELDWYPDAPGEMVVLTCDTPEEDGITWTLDQSSEVLGSGKTLTIRVKEFGDAGQYTCHKGGEVLSHSLLLLHKKEDGIWSTDILKDQKEPKNKTFLRCEAKNYSGRFTCWWLTTISTDLTFSVKSSRGSSDPQGVTCGAATLSAERVRGDNKEYEYSVECQEDSACPAAEESLPIEVMVDAVHKLKYENYTSSFFIRDIIKPDPPKNLQLKPLKNSRQVEVSWEYPDTWSTPHSYFSLTFCVQVQGKSKREKKDRVFTDKTSATVICRKNASISVRAQDRCYSSSWSEWASVPCSRVESKYGPPCPPCPAPEFEGGPSVFLFPPKPKDTLMISRTPEVTCVVVDVSQEDPEVQFNWYVDGVEVHNAKTKPREEQFNSTYRVVSVLTVLHQDWLNGKEYKCKVSNKGLPSSIEKTISKAKGQPREPQVCTLPPSQEEMTENQVSLTCLVKGFYPSDIAVEWESNGQPENNYKTTPPVLDSDGSFFLYSWLTVDKSRWQEGNVFSCSVMHEALHNHYTQKSLSLSLG

SEQ ID NO: 92 - protein, 442 aa, Artificial Sequence
  Description of Artificial Sequence: Synthetic polypeptide
RNLPVATPDPGMFPCLHHSQNLLRAVSNMLQKARQTLEFYPCTSEEIDHVDITKDKTSTVEACLPLELTKNESCLNSRETSFITNGSCLASRKTSFMMALCLSSIYEDLKMYQVEFKTMNAKLLMDPKRQIFLDQNMLAVIDELMQALNFNSETVPQKSSLEEPDFYKTKIKLCILLHAFRIRACTIDRVMSYLNASGGGGSGGGGSGGGGSRVESKYGPPCPPCPAPEFEGGPSVFLFPPKPKDTLMISRTPEVTCVVVDVSQEDPEVQFNWYVDGVEVHNAKTKPREEQFNSTYRVVSVLTVLHQDWLNGKEYKCKVSNKGLPSSIEKTISKAKGQPREPRVYTLPPCQEEMTKNQVSLTCLVKGFYPSDIAVEWESNGQPENNYKTTPPVLVSDGSFTLYSRLTVDKSRWQEGNVFSCSVMHEALHNHYTQKSLSLSLG

SEQ ID NO: 93 - protein, 536 aa, Artificial Sequence
  Description of Artificial Sequence: Synthetic polypeptide
IWELKKDVYVVELDWYPDAPGEMVVLTCDTPEEDGITWTLDQSSEVLGSGKTLTIRVKEFGDAGQYTCHKGGEVLSHSLLLLHKKEDGIWSTDILKDQKEPKNKTFLRCEAKNYSGRFTCWWLTTISTDLTFSVKSSRGSSDPQGVTCGAATLSAERVRGDNKEYEYSVECQEDSACPAAEESLPIEVMVDAVHKLKYENYTSSFFIRDIIKPDPPKNLQLKPLKNSRQVEVSWEYPDTWSTPHSYFSLTFCVQVQGKSKREKKDRVFTDKTSATVICRKNASISVRAQDRCYSSSWSEWASVPCSRVESKYGPPCPPCPAPEFEGGPSVFLFPPKPKDTLMISRTPEVTCVVVDVSQEDPEVQFNWYVDGVEVHNAKTKPREEQFNSTYRVVSVLTVLHQDWLNGKEYKCKVSNKGLASSIEKTISKAKGQPREPQVCTLPPSQEEMTENQVSLTCLVKGFYPSDIAVEWESNGQPENNYKTTPPVLDSDGSFFLYSWLTVDKSRWQEGNVFSCSVMHEALHNHYTQKSLSLSLG

SEQ ID NO: 94 - protein, 442 aa, Artificial Sequence
  Description of Artificial Sequence: Synthetic polypeptide
RNLPVATPDPGMFPCLHHSQNLLRAVSNMLQKARQTLEFYPCTSEEIDHVDITKDKTSTVEACLPLELTKNESCLNSRETSFITNGSCLASRKTSFMMALCLSSIYEDLKMYQVEFKTMNAKLLMDPKRQIFLDQNMLAVIDELMQALNFNSETVPQKSSLEEPDFYKTKIKLCILLHAFRIRACTIDRVMSYLNASGGGGSGGGGSGGGGSRVESKYGPPCPPCPAPEFEGGPSVFLFPPKPKDTLMISRTPEVTCVVVDVSQEDPEVQFNWYVDGVEVHNAKTKPREEQFNSTYRVVSVLTVLHQDWLNGKEYKCKVSNKGLASSIEKTISKAKGQPREPRVYTLPPCQEEMTKNQVSLTCLVKGFYPSDIAVEWESNGQPENNYKTTPPVLVSDGSFTLYSRLTVDKSRWQEGNVFSCSVMHEALHNHYTQKSLSLSLG

SEQ ID NO: 95 - protein, 536 aa, Artificial Sequence
  Description of Artificial Sequence: Synthetic polypeptide
IWELKKDVYVVELDWYPDAPGEMVVLTCDTPEEDGITWTLDQSSEVLGSGKTLTIRVKEFGDAGQYTCHKGGEVLSHSLLLLHKKEDGIWSTDILKDQKEPKNKTFLRCEAKNYSGRFTCWWLTTISTDLTFSVKSSRGSSDPQGVTCGAATLSAERVRGDNKEYEYSVECQEDSACPAAEESLPIEVMVDAVHKLKYENYTSSFFIRDIIKPDPPKNLQLKPLKNSRQVEVSWEYPDTWSTPHSYFSLTFCVQVQGKSKREKKDRVFTDKTSATVICRKNASISVRAQDRCYSSSWSEWASVPCSRVESKYGPPCPPCPAPEFEGGPSVFLFPPKPKDTLMISRTPEVTCVVVDVSQEDPEVQFNWYVDGVEVHNAKTKPREEQFNSTYRVVSVLTVLHQDWLNGKEYKCKVSNKGLGSSIEKTISKAKGQPREPQVCTLPPSQEEMTENQVSLTCLVKGFYPSDIAVEWESNGQPENNYKTTPPVLDSDGSFFLYSWLTVDKSRWQEGNVFSCSVMHEALHNHYTQKSLSLSLG

SEQ ID NO: 96 - protein, 442 aa, Artificial Sequence
  Description of Artificial Sequence: Synthetic polypeptide
RNLPVATPDPGMFPCLHHSQNLLRAVSNMLQKARQTLEFYPCTSEEIDHVDITKDKTSTVEACLPLELTKNESCLNSRETSFITNGSCLASRKTSFMMALCLSSIYEDLKMYQVEFKTMNAKLLMDPKRQIFLDQNMLAVIDELMQALNFNSETVPQKSSLEEPDFYKTKIKLCILLHAFRIRACTIDRVMSYLNASGGGGSGGGGSGGGGSRVESKYGPPCPPCPAPEFEGGPSVFLFPPKPKDTLMISRTPEVTCVVVDVSQEDPEVQFNWYVDGVEVHNAKTKPREEQFNSTYRVVSVLTVLHQDWLNGKEYKCKVSNKGLGSSIEKTISKAKGQPREPRVYTLPPCQEEMTKNQVSLTCLVKGFYPSDIAVEWESNGQPENNYKTTPPVLVSDGSFTLYSRLTVDKSRWQEGNVFSCSVMHEALHNHYTQKSLSLSLG

SEQ ID NO: 97 - protein, 537 aa, Artificial Sequence
  Description of Artificial Sequence: Synthetic polypeptide
IWELKKDVYVVELDWYPDAPGEMVVLTCDTPEEDGITWTLDQSSEVLGSGKTLTIRVKEFGDAGQYTCHKGGEVLSHSLLLLHKKEDGIWSTDILKDQKEPKNKTFLRCEAKNYSGRFTCWWLTTISTDLTFSVKSSRGSSDPQGVTCGAATLSAERVRGDNKEYEYSVECQEDSACPAAEESLPIEVMVDAVHKLKYENYTSSFFIRDIIKPDPPKNLQLKPLKNSRQVEVSWEYPDTWSTPHSYFSLTFCVQVQGKSKREKKDRVFTDKTSATVICRKNASISVRAQDRCYSSSWSEWASVPCSEPKSSDKTHTCPPCPAPELLGGPSVFLFPPKPKDTLMISRTPEVTCVVVDVSHEDPEVKFNWYVDGVEVHNAKTKPREEQYNSTYRVVSVLTVLHQDWLNGKEYKCKVSNKALPAPIEKTISKAKGQPREPQVCTLPPSRDELTENQVSLTCLVKGFYPSDIAVEWESNGQPENNYKTTPPVLDSDGSFFLYSWLTVDKSRWQQGNVFSCSVMHEALHNHYTQKSLSLSPG

SEQ ID NO: 98 - protein, 443 aa, Artificial Sequence
  Description of Artificial Sequence: Synthetic polypeptide
RNLPVATPDPGMFPCLHHSQNLLRAVSNMLQKARQTLEFYPCTSEEIDHVDITKDKTSTVEACLPLELTKNESCLNSRETSFITNGSCLASRKTSFMMALCLSSIYEDLKMYQVEFKTMNAKLLMDPKRQIFLDQNMLAVIDELMQALNFNSETVPQKSSLEEPDFYKTKIKLCILLHAFRIRACTIDRVMSYLNASGGGGSGGGGSGGGGSEPKSSDKTHTCPPCPAPELLGGPSVFLFPPKPKDTLMISRTPEVTCVVVDVSHEDPEVKFNWYVDGVEVHNAKTKPREEQYNSTYRVVSVLTVLHQDWLNGKEYKCKVSNKALPAPIEKTISKAKGQPREPRVYTLPPCRDELTKNQVSLTCLVKGFYPSDIAVEWESNGQPENNYKTTPPVLVSDGSFTLYSKLTVDKSRWQQGNVFSCSVMHEALHNHYTQKSLSLSPG

SEQ ID NO: 99 - protein, 537 aa, Artificial Sequence; identical to SEQ ID NO: 57
  Description of Artificial Sequence: Synthetic polypeptide

SEQ ID NO: 100 - protein, 443 aa, Artificial Sequence; identical to SEQ ID NO: 58
  Description of Artificial Sequence: Synthetic polypeptide

SEQ ID NO: 101 - protein, 537 aa, Artificial Sequence; identical to SEQ ID NO: 59
  Description of Artificial Sequence: Synthetic polypeptide

SEQ ID NO: 102 - protein, 443 aa, Artificial Sequence; identical to SEQ ID NO: 60
  Description of Artificial Sequence: Synthetic polypeptide

SEQ ID NO: 103 - protein, 537 aa, Artificial Sequence
  Description of Artificial Sequence: Synthetic polypeptide
IWELKKDVYVVELDWYPDAPGEMVVLTCDTPEEDGITWTLDQSSEVLGSGKTLTIRVKEFGDAGQYTCHKGGEVLSHSLLLLHKKEDGIWSTDILKDQKEPKNKTFLRCEAKNYSGRFTCWWLTTISTDLTFSVKSSRGSSDPQGVTCGAATLSAERVRGDNKEYEYSVECQEDSACPAAEESLPIEVMVDAVHKLKYENYTSSFFIRDIIKPDPPKNLQLKPLKNSRQVEVSWEYPDTWSTPHSYFSLTFCVQVQGKSKREKKDRVFTDKTSATVICRKNASISVRAQDRCYSSSWSEWASVPCSEPKSSDKTHTCPPCPAPEAAGGPSVFLFPPKPKDTLMISRTPEVTCVVVDVSHEDPEVKFNWYVDGVEVHNAKTKPREEQYNSTYRVVSVLTVLHQDWLNGKEYKCKVSNKALGAPIEKTISKAKGQPREPQVCTLPPSRDELTENQVSLTCLVKGFYPSDIAVEWESNGQPENNYKTTPPVLDSDGSFFLYSWLTVDKSRWQQGNVFSCSVMHEALHNHYTQKSLSLSPG

SEQ ID NO: 104 - protein, 443 aa, Artificial Sequence
  Description of Artificial Sequence: Synthetic polypeptide
RNLPVATPDPGMFPCLHHSQNLLRAVSNMLQKARQTLEFYPCTSEEIDHVDITKDKTSTVEACLPLELTKNESCLNSRETSFITNGSCLASRKTSFMMALCLSSIYEDLKMYQVEFKTMNAKLLMDPKRQIFLDQNMLAVIDELMQALNFNSETVPQKSSLEEPDFYKTKIKLCILLHAFRIRACTIDRVMSYLNASGGGGSGGGGSGGGGSEPKSSDKTHTCPPCPAPEAAGGPSVFLFPPKPKDTLMISRTPEVTCVVVDVSHEDPEVKFNWYVDGVEVHNAKTKPREEQYNSTYRVVSVLTVLHQDWLNGKEYKCKVSNKALGAPIEKTISKAKGQPREPRVYTLPPCRDELTKNQVSLTCLVKGFYPSDIAVEWESNGQPENNYKTTPPVLVSDGSFTLYSKLTVDKSRWQQGNVFSCSVMHEALHNHYTQKSLSLSPG

SEQ ID NO: 105 - protein, 537 aa, Artificial Sequence; identical to SEQ ID NO: 61
  Description of Artificial Sequence: Synthetic polypeptide

SEQ ID NO: 106 - protein, 443 aa, Artificial Sequence; identical to SEQ ID NO: 62
  Description of Artificial Sequence: Synthetic polypeptide

SEQ ID NO: 107 - protein, 20 aa, Artificial Sequence
  Description of Artificial Sequence: Synthetic peptide
GGGGSGGGGSGGGGSGGGGS

SEQ ID NO: 108 - protein, 15 aa, Artificial Sequence
  Description of Artificial Sequence: Synthetic peptide
GGGGSGGGGSGGGGS

SEQ ID NO: 109 - protein, 10 aa, Artificial Sequence
  Description of Artificial Sequence: Synthetic peptide
GGGGSGGGGS

SEQ ID NO: 110 - protein, 5 aa, Artificial Sequence
  Description of Artificial Sequence: Synthetic peptide
GGGGS

SEQ ID NO: 111 - protein, 20 aa, Artificial Sequence
  Description of Artificial Sequence: Synthetic peptide
GSGSGSGSGSGSGSGSGSGS

SEQ ID NO: 112 - protein, 30 aa, Artificial Sequence
  Description of Artificial Sequence: Synthetic polypeptide
GGSGGSGGSGGSGGSGGSGGSGGSGGSGGS

SEQ ID NO: 113 - protein, 40 aa, Artificial Sequence
  Description of Artificial Sequence: Synthetic polypeptide
GGGSGGGSGGGSGGGSGGGSGGGSGGGSGGGSGGGSGGGS

SEQ ID NO: 114 - protein, 40 aa, Artificial Sequence
  Description of Artificial Sequence: Synthetic polypeptide
GGSGGGSGGGSGGGSGGGSGGGSGGGSGGGSGGGSGGGSG

SEQ ID NO: 115 - protein, 50 aa, Artificial Sequence
  Description of Artificial Sequence: Synthetic polypeptide
GGSGGGGSGGGGSGGGGSGGGGSGGGGSGGGGSGGGGSGGGGSGGGGSGG

SEQ ID NO: 116 - protein, 50 aa, Artificial Sequence
  Description of Artificial Sequence: Synthetic polypeptide
GGGGSGGGGSGGGGSGGGGSGGGGSGGGGSGGGGSGGGGSGGGGSGGGGS

SEQ ID NO: 117 - protein, 20 aa, Artificial Sequence
  Description of Artificial Sequence: Synthetic peptide
GGGGSGGGGSGGGGSGGGGS

SEQ ID NO: 118 - protein, 15 aa, Artificial Sequence
  Description of Artificial Sequence: Synthetic peptide
GGGGSGGGGSGGGGS

SEQ ID NO: 119 - protein, 100 aa, Artificial Sequence
  Description of Artificial Sequence: Synthetic polypeptide
GGGGSGGGGSGGGGSGGGGSGGGGSGGGGSGGGGSGGGGSGGGGSGGGGSGGGGSGGGGSGGGGSGGGGSGGGGSGGGGSGGGGSGGGGSGGGGSGGGGS

SEQ ID NO: 120 - protein, 100 aa, Artificial Sequence
  Description of Artificial Sequence: Synthetic polypeptide
GGSGGGGSGGGGSGGGGSGGGGSGGGGSGGGGSGGGGSGGGGSGGGGSGGGGSGGGGSGGGGSGGGGSGGGGSGGGGSGGGGSGGGGSGGGGSGGGGSGG

SEQ ID NO: 121 - protein, 306 aa, Artificial Sequence
  Description of Artificial Sequence: Synthetic polypeptide
IWELKKDVYVVELDWYPDAPGEMVVLTCDTPEEDGITWTLDQSSEVLGSGKTLTIRVKEFGDAGQYTCHKGGEVLSHSLLLLHKKEDGIWSTDILKDQKEPKNKTFLRCEAKNYSGRFTCWWLTTISTDLTFSVKSSRGSSDPQGVTCGAATLSAERVRGDNKEYEYSVECQEDSACPAAEESLPIEVMVDAVHKLKYENYTSSFFIRDIIKPDPPKNLQLKPLKNSRQVEVSWEYPDTWSTPHSYFSLTFCVQVQGKSKREKKDRVFTDKTSATVICRKNASISVRAQDRYYSSSWSEWASVPCS

SEQ ID NO: 122 - protein, 197 aa, Artificial Sequence
  Description of Artificial Sequence: Synthetic polypeptide
RNLPVATPDPGMFPCLHHSQNLLRAVSNMLQKARQTLEFYPCTSEEIDHVDITKDKTSTVEACLPLELTKNESCLNSRETSFITNGSCLASRKTSFMMALCLSSIYEDLKMYQVEFKTMNAKLLMDPKRQIFLDQNMLAVIDELMQALNFNSETVPQKSSLEEPDFYKTKIKLCILLHAFRIRAVTIDRVMSYLNAS

SEQ ID NO: 123 - protein, 306 aa, Artificial Sequence
  Description of Artificial Sequence: Synthetic polypeptide
IWELKKDVYVVELDWYPDAPGEMVVLTCDTPEEDGITWTLDQSSEVLGSGKTLTIRVKEFGDAGQYTCHKGGEVLSHSLLLLHKKEDGIWSTDILKDQKEPKNKTFLRCEAKNYSGRFTCWWLTTISTDLTFSVKSSRGSSDPQGVTCGAATLSAERVRGDNKEYEYSVECQEDSASPAAEESLPIEVMVDAVHKLKYENYTSSFFIRDIIKPDPPKNLQLKPLKNSRQVEVSWEYPDTWSTPHSYFSLTFCVQVQGKSKREKKDRVFTDKTSATVICRKNASISVRAQDRCYSSSWSEWASVPCS

SEQ ID NO: 124 - protein, 197 aa, Artificial Sequence
  Description of Artificial Sequence: Synthetic polypeptide
RNLPVATPDPGMFPCLHHSQNLLRAVSNMLQKARQTLEFYPCTSEEIDHVDITKDKTSTVEACLPLELTKNESSLNSRETSFITNGSCLASRKTSFMMALCLSSIYEDLKMYQVEFKTMNAKLLMDPKRQIFLDQNMLAVIDELMQALNFNSETVPQKSSLEEPDFYKTKIKLCILLHAFRIRACTIDRVMSYLNAS

SEQ ID NO: 125 - protein, 306 aa, Artificial Sequence
  Description of Artificial Sequence: Synthetic polypeptide
IWELKKDVYVVELDWYPDAPGEMVVLTCDTPEEDGITWTLDQSSEVLGSGKTLTIRVKEFGDAGQYTCHKGGEVLSHSLLLLHKKEDGIWSTDILKDQKEPKNKTFLRCEAKNYSGRFTCWWLTTISTDLTFSVKSSRGSSDPQGVTCGAATLSAERVRGDNKEYEYSVECQEDSACPAAEESLPIEVMVDAVHKLKYENYTSSFFIRDIIKPDPPKNLQLKPLKNSRQVEVSWEYPDTWSTPHSYFSLTFCVQVQGKSKREKKDRVFTDKTSATVICRKNASISVRAQDRCYSSSWSEWASVPCS

SEQ ID NO: 126 - protein, 197 aa, Artificial Sequence
  Description of Artificial Sequence: Synthetic polypeptide
RNLPVATPDPGMFPCLHHSQNLLRAVSNMLQKARQTLEFYPCTSEEIDHVDITKDKTSTVEACLPLELTKNESCLNSRETSFITNGSCLASRKTSFMMALCLSSIYEDLKMYQVEFKTMNAKLLMDPKRQIFLDQNMLAVIDELMQALNFNSETVPQKSSLEEPDFYKTKIKLCILLHAFRIRACTIDRVMSYLNAS

SEQ ID NO: 127 - protein, 306 aa, Homo sapiens
IWELKKDVYVVELDWYPDAPGEMVVLTCDTPEEDGITWTLDQSSEVLGSGKTLTIQVKEFGDAGQYTCHKGGEVLSHSLLLLHKKEDGIWSTDILKDQKEPKNKTFLRCEAKNYSGRFTCWWLTTISTDLTFSVKSSRGSSDPQGVTCGAATLSAERVRGDNKEYEYSVECQEDSACPAAEESLPIEVMVDAVHKLKYENYTSSFFIRDIIKPDPPKNLQLKPLKNSRQVEVSWEYPDTWSTPHSYFSLTFCVQVQGKSKREKKDRVFTDKTSATVICRKNASISVRAQDRYYSSSWSEWASVPCS

SEQ ID NO: 128 - protein, 197 aa, Homo sapiens
RNLPVATPDPGMFPCLHHSQNLLRAVSNMLQKARQTLEFYPCTSEEIDHEDITKDKTSTVEACLPLELTKNESCLNSRETSFITNGSCLASRKTSFMMALCLSSIYEDLKMYQVEFKTMNAKLLMDPKRQIFLDQNMLAVIDELMQALNFNSETVPQKSSLEEPDFYKTKIKLCILLHAFRIRAVTIDRVMSYLNAS

SEQ ID NO: 129 - protein, 536 aa, Artificial Sequence
  Description of Artificial Sequence: Synthetic polypeptide
IWELKKDVYVVELDWYPDAPGEMVVLTCDTPEEDGITWTLDQSSEVLGSGKTLTIQVKEFGDAGQYTCHKGGEVLSHSLLLLHKKEDGIWSTDILKDQKEPKNKTFLRCEAKNYSGRFTCWWLTTISTDLTFSVKSSRGSSDPQGVTCGAATLSAERVRGDNKEYEYSVECQEDSACPAAEESLPIEVMVDAVHKLKYENYTSSFFIRDIIKPDPPKNLQLKPLKNSRQVEVSWEYPDTWSTPHSYFSLTFCVQVQGKSKREKKDRVFTDKTSATVICRKNASISVRAQDRYYSSSWSEWASVPCSRVESKYGPPCPPCPAPEFLGGPSVFLFPPKPKDTLMISRTPEVTCVVVDVSQEDPEVQFNWYVDGVEVHNAKTKPREEQFNSTYRVVSVLTVLHQDWLNGKEYKCKVSNKGLPSSIEKTISKAKGQPREPQVCTLPPSQEEMTKNQVSLTCLVEGFYPSDIAVEWESNGQPENNYKTTPPVLDSDGSFFLYSWLTVDKSRWQEGNVFSCSVMHEALHNHYTQKSLSLSLG

SEQ ID NO: 130 - protein, 442 aa, Artificial Sequence
  Description of Artificial Sequence: Synthetic polypeptide
RNLPVATPDPGMFPCLHHSQNLLRAVSNMLQKARQTLEFYPCTSEEIDHEDITKDKTSTVEACLPLELTKNESCLNSRETSFITNGSCLASRKTSFMMALCLSSIYEDLKMYQVEFKTMNAKLLMDPKRQIFLDQNMLAVIDELMQALNFNSETVPQKSSLEEPDFYKTKIKLCILLHAFRIRAVTIDRVMSYLNASGGGGSGGGGSGGGGSRVESKYGPPCPPCPAPEFLGGPSVFLFPPKPKDTLMISRTPEVTCVVVDVSQEDPEVQFNWYVDGVEVHNAKTKPREEQFNSTYRVVSVLTVLHQDWLNGKEYKCKVSNKGLPSSIEKTISKAKGQPREPQVYTLPPCQENMTKNQVSLTCLVKGFYPSDIAVEWESNGQPENNYKTTPPVLVSDGSFTLYSRLTVDKSRWQEGNVFSCSVMHEALHNHYTQKSLSLSLG

SEQ ID NO: 131 - protein, 536 aa, Artificial Sequence
  Description of Artificial Sequence: Synthetic polypeptide
IWELKKDVYVVELDWYPDAPGEMVVLTCDTPEEDGITWTLDQSSEVLGSGKTLTIQVKEFGDAGQYTCHKGGEVLSHSLLLLHKKEDGIWSTDILKDQKEPKNKTFLRCEAKNYSGRFTCWWLTTISTDLTFSVKSSRGSSDPQGVTCGAATLSAERVRGDNKEYEYSVECQEDSACPAAEESLPIEVMVDAVHKLKYENYTSSFFIRDIIKPDPPKNLQLKPLKNSRQVEVSWEYPDTWSTPHSYFSLTFCVQVQGKSKREKKDRVFTDKTSATVICRKNASISVRAQDRYYSSSWSEWASVPCSRVESKYGPPCPPCPAPEFLGGPSVFLFPPKPKDTLMISRTPEVTCVVVDVSQEDPEVQFNWYVDGVEVHNAKTKPREEQFNSTYRVVSVLTVLHQDWLNGKEYKCKVSNKGLPSSIEKTISKAKGQPREPQVCTLPPSQEEMTENQVSLTCLVKGFYPSDIAVEWESNGQPENNYKTTPPVLDSDGSFFLYSWLTVDKSRWQEGNVFSCSVMHEALHNHYTQKSLSLSLG

SEQ ID NO: 132 - protein, 442 aa, Artificial Sequence
  Description of Artificial Sequence: Synthetic polypeptide
RNLPVATPDPGMFPCLHHSQNLLRAVSNMLQKARQTLEFYPCTSEEIDHEDITKDKTSTVEACLPLELTKNESCLNSRETSFITNGSCLASRKTSFMMALCLSSIYEDLKMYQVEFKTMNAKLLMDPKRQIFLDQNMLAVIDELMQALNFNSETVPQKSSLEEPDFYKTKIKLCILLHAFRIRAVTIDRVMSYLNASGGGGSGGGGSGGGGSRVESKYGPPCPPCPAPEFLGGPSVFLFPPKPKDTLMISRTPEVTCVVVDVSQEDPEVQFNWYVDGVEVHNAKTKPREEQFNSTYRVVSVLTVLHQDWLNGKEYKCKVSNKGLPSSIEKTISKAKGQPREPRVYTLPPCQEEMTKNQVSLTCLVKGFYPSDIAVEWESNGQPENNYKTTPPVLVSDGSFTLYSRLTVDKSRWQEGNVFSCSVMHEALHNHYTQKSLSLSLG

SEQ ID NO: 133 - protein, 536 aa, Artificial Sequence
  Description of Artificial Sequence: Synthetic polypeptide
IWELKKDVYVVELDWYPDAPGEMVVLTCDTPEEDGITWTLDQSSEVLGSGKTLTIQVKEFGDAGQYTCHKGGEVLSHSLLLLHKKEDGIWSTDILKDQKEPKNKTFLRCEAKNYSGRFTCWWLTTISTDLTFSVKSSRGSSDPQGVTCGAATLSAERVRGDNKEYEYSVECQEDSACPAAEESLPIEVMVDAVHKLKYENYTSSFFIRDIIKPDPPKNLQLKPLKNSRQVEVSWEYPDTWSTPHSYFSLTFCVQVQGKSKREKKDRVFTDKTSATVICRKNASISVRAQDRYYSSSWSEWASVPCSRVESKYGPPCPPCPAPEFEGGPSVFLFPPKPKDTLMISRTPEVTCVVVDVSQEDPEVQFNWYVDGVEVHNAKTKPREEQFNSTYRVVSVLTVLHQDWLNGKEYKCKVSNKGLPSSIEKTISKAKGQPREPQVCTLPPSQEEMTENQVSLTCLVKGFYPSDIAVEWESNGQPENNYKTTPPVLDSDGSFFLYSWLTVDKSRWQEGNVFSCSVMHEALHNHYTQKSLSLSLG

SEQ ID NO: 134 - protein, 442 aa, Artificial Sequence
  Description of Artificial Sequence: Synthetic polypeptide
RNLPVATPDPGMFPCLHHSQNLLRAVSNMLQKARQTLEFYPCTSEEIDHEDITKDKTSTVEACLPLELTKNESCLNSRETSFITNGSCLASRKTSFMMALCLSSIYEDLKMYQVEFKTMNAKLLMDPKRQIFLDQNMLAVIDELMQALNFNSETVPQKSSLEEPDFYKTKIKLCILLHAFRIRAVTIDRVMSYLNASGGGGSGGGGSGGGGSRVESKYGPPCPPCPAPEFEGGPSVFLFPPKPKDTLMISRTPEVTCVVVDVSQEDPEVQFNWYVDGVEVHNAKTKPREEQFNSTYRVVSVLTVLHQDWLNGKEYKCKVSNKGLPSSIEKTISKAKGQPREPRVYTLPPCQEEMTKNQVSLTCLVKGFYPSDIAVEWESNGQPENNYKTTPPVLVSDGSFTLYSRLTVDKSRWQEGNVFSCSVMHEALHNHYTQKSLSLSLG

SEQ ID NO: 135 - protein, 536 aa, Artificial Sequence
  Description of Artificial Sequence: Synthetic polypeptide
IWELKKDVYVVELDWYPDAPGEMVVLTCDTPEEDGITWTLDQSSEVLGSGKTLTIQVKEFGDAGQYTCHKGGEVLSHSLLLLHKKEDGIWSTDILKDQKEPKNKTFLRCEAKNYSGRFTCWWLTTISTDLTFSVKSSRGSSDPQGVTCGAATLSAERVRGDNKEYEYSVECQEDSACPAAEESLPIEVMVDAVHKLKYENYTSSFFIRDIIKPDPPKNLQLKPLKNSRQVEVSWEYPDTWSTPHSYFSLTFCVQVQGKSKREKKDRVFTDKTSATVICRKNASISVRAQDRYYSSSWSEWASVPCSRVESKYGPPCPPCPAPEFEGGPSVFLFPPKPKDTLMISRTPEVTCVVVDVSQEDPEVQFNWYVDGVEVHNAKTKPREEQFNSTYRVVSVLTVLHQDWLNGKEYKCKVSNKGLASSIEKTISKAKGQPREPQVCTLPPSQEEMTENQVSLTCLVKGFYPSDIAVEWESNGQPENNYKTTPPVLDSDGSFFLYSWLTVDKSRWQEGNVFSCSVMHEALHNHYTQKSLSLSLG

SEQ ID NO: 136 - protein, 442 aa, Artificial Sequence
  Description of Artificial Sequence: Synthetic polypeptide
RNLPVATPDPGMFPCLHHSQNLLRAVSNMLQKARQTLEFYPCTSEEIDHEDITKDKTSTVEACLPLELTKNESCLNSRETSFITNGSCLASRKTSFMMALCLSSIYEDLKMYQVEFKTMNAKLLMDPKRQIFLDQNMLAVIDELMQALNFNSETVPQKSSLEEPDFYKTKIKLCILLHAFRIRAVTIDRVMSYLNASGGGGSGGGGSGGGGSRVESKYGPPCPPCPAPEFEGGPSVFLFPPKPKDTLMISRTPEVTCVVVDVSQEDPEVQFNWYVDGVEVHNAKTKPREEQFNSTYRVVSVLTVLHQDWLNGKEYKCKVSNKGLASSIEKTISKAKGQPREPRVYTLPPCQEEMTKNQVSLTCLVKGFYPSDIAVEWESNGQPENNYKTTPPVLVSDGSFTLYSRLTVDKSRWQEGNVFSCSVMHEALHNHYTQKSLSLSLG

SEQ ID NO: 137 - protein, 537 aa, Artificial Sequence
  Description of Artificial Sequence: Synthetic polypeptide
IWELKKDVYVVELDWYPDAPGEMVVLTCDTPEEDGITWTLDQSSEVLGSGKTLTIQVKEFGDAGQYTCHKGGEVLSHSLLLLHKKEDGIWSTDILKDQKEPKNKTFLRCEAKNYSGRFTCWWLTTISTDLTFSVKSSRGSSDPQGVTCGAATLSAERVRGDNKEYEYSVECQEDSACPAAEESLPIEVMVDAVHKLKYENYTSSFFIRDIIKPDPPKNLQLKPLKNSRQVEVSWEYPDTWSTPHSYFSLTFCVQVQGKSKREKKDRVFTDKTSATVICRKNASISVRAQDRYYSSSWSEWASVPCSEPKSSDKTHTCPPCPAPELLGGPSVFLFPPKPKDTLMISRTPEVTCVVVDVSHEDPEVKFNWYVDGVEVHNAKTKPREEQYNSTYRVVSVLTVLHQDWLNGKEYKCKVSNKALPAPIEKTISKAKGQPREPQVCTLPPSRDELTENQVSLTCLVKGFYPSDIAVEWESNGQPENNYKTTPPVLDSDGSFFLYSWLTVDKSRWQQGNVFSCSVMHEALHNHYTQKSLSLSPG

SEQ ID NO: 138 - protein, 443 aa, Artificial Sequence
  Description of Artificial Sequence: Synthetic polypeptide
RNLPVATPDPGMFPCLHHSQNLLRAVSNMLQKARQTLEFYPCTSEEIDHEDITKDKTSTVEACLPLELTKNESCLNSRETSFITNGSCLASRKTSFMMALCLSSIYEDLKMYQVEFKTMNAKLLMDPKRQIFLDQNMLAVIDELMQALNFNSETVPQKSSLEEPDFYKTKIKLCILLHAFRIRAVTIDRVMSYLNASGGGGSGGGGSGGGGSEPKSSDKTHTCPPCPAPELLGGPSVFLFPPKPKDTLMISRTPEVTCVVVDVSHEDPEVKFNWYVDGVEVHNAKTKPREEQYNSTYRVVSVLTVLHQDWLNGKEYKCKVSNKALPAPIEKTISKAKGQPREPRVYTLPPCRDELTKNQVSLTCLVKGFYPSDIAVEWESNGQPENNYKTTPPVLVSDGSFTLYSKLTVDKSRWQQGNVFSCSVMHEALHNHYTQKSLSLSPG

SEQ ID NO: 139 - protein, 537 aa, Artificial Sequence
  Description of Artificial Sequence: Synthetic polypeptide
IWELKKDVYVVELDWYPDAPGEMVVLTCDTPEEDGITWTLDQSSEVLGSGKTLTIQVKEFGDAGQYTCHKGGEVLSHSLLLLHKKEDGIWSTDILKDQKEPKNKTFLRCEAKNYSGRFTCWWLTTISTDLTFSVKSSRGSSDPQGVTCGAATLSAERVRGDNKEYEYSVECQEDSACPAAEESLPIEVMVDAVHKLKYENYTSSFFIRDIIKPDPPKNLQLKPLKNSRQVEVSWEYPDTWSTPHSYFSLTFCVQVQGKSKREKKDRVFTDKTSATVICRKNASISVRAQDRYYSSSWSEWASVPCSEPKSSDKTHTCPPCPAPEAAGGPSVFLFPPKPKDTLMISRTPEVTCVVVDVSHEDPEVKFNWYVDGVEVHNAKTKPREEQYNSTYRVVSVLTVLHQDWLNGKEYKCKVSNKALPAPIEKTISKAKGQPREPQVCTLPPSRDELTENQVSLTCLVKGFYPSDIAVEWESNGQPENNYKTTPPVLDSDGSFFLYSWLTVDKSRWQQGNVFSCSVMHEALHNHYTQKSLSLSPG

SEQ ID NO: 140 - protein, 443 aa, Artificial Sequence
  Description of Artificial Sequence: Synthetic polypeptide
RNLPVATPDPGMFPCLHHSQNLLRAVSNMLQKARQTLEFYPCTSEEIDHEDITKDKTSTVEACLPLELTKNESCLNSRETSFITNGSCLASRKTSFMMALCLSSIYEDLKMYQVEFKTMNAKLLMDPKRQIFLDQNMLAVIDELMQALNFNSETVPQKSSLEEPDFYKTKIKLCILLHAFRIRAVTIDRVMSYLNASGGGGSGGGGSGGGGSEPKSSDKTHTCPPCPAPEAAGGPSVFLFPPKPKDTLMISRTPEVTCVVVDVSHEDPEVKFNWYVDGVEVHNAKTKPREEQYNSTYRVVSVLTVLHQDWLNGKEYKCKVSNKALPAPIEKTISKAKGQPREPRVYTLPPCRDELTKNQVSLTCLVKGFYPSDIAVEWESNGQPENNYKTTPPVLVSDGSFTLYSKLTVDKSRWQQGNVFSCSVMHEALHNHYTQKSLSLSPG

SEQ ID NO: 141 - protein, 537 aa, Artificial Sequence
  Description of Artificial Sequence: Synthetic polypeptide
IWELKKDVYVVELDWYPDAPGEMVVLTCDTPEEDGITWTLDQSSEVLGSGKTLTIQVKEFGDAGQYTCHKGGEVLSHSLLLLHKKEDGIWSTDILKDQKEPKNKTFLRCEAKNYSGRFTCWWLTTISTDLTFSVKSSRGSSDPQGVTCGAATLSAERVRGDNKEYEYSVECQEDSACPAAEESLPIEVMVDAVHKLKYENYTSSFFIRDIIKPDPPKNLQLKPLKNSRQVEVSWEYPDTWSTPHSYFSLTFCVQVQGKSKREKKDRVFTDKTSATVICRKNASISVRAQDRYYSSSWSEWASVPCSEPKSSDKTHTCPPCPAPEAAGGPSVFLFPPKPKDTLMISRTPEVTCVVVDVSHEDPEVKFNWYVDGVEVHNAKTKPREEQYNSTYRVVSVLTVLHQDWLNGKEYKCKVSNKALAAPIEKTISKAKGQPREPQVCTLPPSRDELTENQVSLTCLVKGFYPSDIAVEWESNGQPENNYKTTPPVLDSDGSFFLYSWLTVDKSRWQQGNVFSCSVMHEALHNHYTQKSLSLSPG

SEQ ID NO: 142 - protein, 443 aa, Artificial Sequence
  Description of Artificial Sequence: Synthetic polypeptide
RNLPVATPDPGMFPCLHHSQNLLRAVSNMLQKARQTLEFYPCTSEEIDHEDITKDKTSTVEACLPLELTKNESCLNSRETSFITNGSCLASRKTSFMMALCLSSIYEDLKMYQVEFKTMNAKLLMDPKRQIFLDQNMLAVIDELMQALNFNSETVPQKSSLEEPDFYKTKIKLCILLHAFRIRAVTIDRVMSYLNASGGGGSGGGGSGGGGSEPKSSDKTHTCPPCPAPEAAGGPSVFLFPPKPKDTLMISRTPEVTCVVVDVSHEDPEVKFNWYVDGVEVHNAKTKPREEQYNSTYRVVSVLTVLHQDWLNGKEYKCKVSNKALAAPIEKTISKAKGQPREPRVYTLPPCRDELTKNQVSLTCLVKGFYPSDIAVEWESNGQPENNYKTTPPVLVSDGSFTLYSKLTVDKSRWQQGNVFSCSVMHEALHNHYTQKSLSLSPG

SEQ ID NO: 143 - protein, 537 aa, Artificial Sequence
  Description of Artificial Sequence: Synthetic polypeptide
IWELKKDVYVVELDWYPDAPGEMVVLTCDTPEEDGITWTLDQSSEVLGSGKTLTIQVKEFGDAGQYTCHKGGEVLSHSLLLLHKKEDGIWSTDILKDQKEPKNKTFLRCEAKNYSGRFTCWWLTTISTDLTFSVKSSRGSSDPQGVTCGAATLSAERVRGDNKEYEYSVECQEDSACPAAEESLPIEVMVDAVHKLKYENYTSSFFIRDIIKPDPPKNLQLKPLKNSRQVEVSWEYPDTWSTPHSYFSLTFCVQVQGKSKREKKDRVFTDKTSATVICRKNASISVRAQDRYYSSSWSEWASVPCSEPKSSDKTHTCPPCPAPEAEGAPSVFLFPPKPKDTLMISRTPEVTCVVVDVSHEDPEVKFNWYVDGVEVHNAKTKPREEQYNSTYRVVSVLTVLHQDWLNGKEYKCKVSNKALPSSIEKTISKAKGQPREPQVCTLPPSRDELTENQVSLTCLVKGFYPSDIAVEWESNGQPENNYKTTPPVLDSDGSFFLYSWLTVDKSRWQQGNVFSCSVMHEALHNHYTQKSLSLSPG

SEQ ID NO: 144 - protein, 443 aa, Artificial Sequence
  Description of Artificial Sequence: Synthetic polypeptide
RNLPVATPDPGMFPCLHHSQNLLRAVSNMLQKARQTLEFYPCTSEEIDHEDITKDKTSTVEACLPLELTKNESCLNSRETSFITNGSCLASRKTSFMMALCLSSIYEDLKMYQVEFKTMNAKLLMDPKRQIFLDQNMLAVIDELMQALNFNSETVPQKSSLEEPDFYKTKIKLCILLHAFRIRAVTIDRVMSYLNASGGGGSGGGGSGGGGSEPKSSDKTHTCPPCPAPEAEGAPSVFLFPPKPKDTLMISRTPEVTCVVVDVSHEDPEVKFNWYVDGVEVHNAKTKPREEQYNSTYRVVSVLTVLHQDWLNGKEYKCKVSNKALPSSIEKTISKAKGQPREPRVYTLPPCRDELTKNQVSLTCLVKGFYPSDIAVEWESNGQPENNYKTTPPVLVSDGSFTLYSKLTVDKSRWQQGNVFSCSVMHEALHNHYTQKSLSLSPG

SEQ ID NO: 145 - protein, 536 aa, Artificial Sequence; identical to SEQ ID NO: 129
  Description of Artificial Sequence: Synthetic polypeptide

SEQ ID NO: 146 - protein, 427 aa, Artificial Sequence
  Description of Artificial Sequence: Synthetic polypeptide
RNLPVATPDPGMFPCLHHSQNLLRAVSNMLQKARQTLEFYPCTSEEIDHEDITKDKTSTVEACLPLELTKNESCLNSRETSFITNGSCLASRKTSFMMALCLSSIYEDLKMYQVEFKTMNAKLLMDPKRQIFLDQNMLAVIDELMQALNFNSETVPQKSSLEEPDFYKTKIKLCILLHAFRIRAVTIDRVMSYLNASRVESKYGPPCPPCPAPEFLGGPSVFLFPPKPKDTLMISRTPEVTCVVVDVSQEDPEVQFNWYVDGVEVHNAKTKPREEQFNSTYRVVSVLTVLHQDWLNGKEYKCKVSNKGLPSSIEKTISKAKGQPREPQVYTLPPCQENMTKNQVSLTCLVKGFYPSDIAVEWESNGQPENNYKTTPPVLVSDGSFTLYSRLTVDKSRWQEGNVFSCSVMHEALHNHYTQKSLSLSLG

SEQ ID NO: 147 - protein, 536 aa, Artificial Sequence; identical to SEQ ID NO: 129
  Description of Artificial Sequence: Synthetic polypeptide

SEQ ID NO: 148 - protein, 432 aa, Artificial Sequence
  Description of Artificial Sequence: Synthetic polypeptide
RNLPVATPDPGMFPCLHHSQNLLRAVSNMLQKARQTLEFYPCTSEEIDHEDITKDKTSTVEACLPLELTKNESCLNSRETSFITNGSCLASRKTSFMMALCLSSIYEDLKMYQVEFKTMNAKLLMDPKRQIFLDQNMLAVIDELMQALNFNSETVPQKSSLEEPDFYKTKIKLCILLHAFRIRAVTIDRVMSYLNASGGGGSRVESKYGPPCPPCPAPEFLGGPSVFLFPPKPKDTLMISRTPEVTCVVVDVSQEDPEVQFNWYVDGVEVHNAKTKPREEQFNSTYRVVSVLTVLHQDWLNGKEYKCKVSNKGLPSSIEKTISKAKGQPREPQVYTLPPCQENMTKNQVSLTCLVKGFYPSDIAVEWESNGQPENNYKTTPPVLVSDGSFTLYSRLTVDKSRWQEGNVFSCSVMHEALHNHYTQKSLSLSLG

SEQ ID NO: 149 - protein, 536 aa, Artificial Sequence; identical to SEQ ID NO: 129
  Description of Artificial Sequence: Synthetic polypeptide

SEQ ID NO: 150 - protein, 437 aa, Artificial Sequence
  Description of Artificial Sequence: Synthetic polypeptide
RNLPVATPDPGMFPCLHHSQNLLRAVSNMLQKARQTLEFYPCTSEEIDHEDITKDKTSTVEACLPLELTKNESCLNSRETSFITNGSCLASRKTSFMMALCLSSIYEDLKMYQVEFKTMNAKLLMDPKRQIFLDQNMLAVIDELMQALNFNSETVPQKSSLEEPDFYKTKIKLCILLHAFRIRAVTIDRVMSYLNASGGGGSGGGGSRVESKYGPPCPPCPAPEFLGGPSVFLFPPKPKDTLMISRTPEVTCVVVDVSQEDPEVQFNWYVDGVEVHNAKTKPREEQFNSTYRVVSVLTVLHQDWLNGKEYKCKVSNKGLPSSIEKTISKAKGQPREPQVYTLPPCQENMTKNQVSLTCLVKGFYPSDIAVEWESNGQPENNYKTTPPVLVSDGSFTLYSRLTVDKSRWQEGNVFSCSVMHEALHNHYTQKSLSLSLG

SEQ ID NO: 151 - protein, 537 aa, Artificial Sequence; identical to SEQ ID NO: 137
  Description of Artificial Sequence: Synthetic polypeptide

SEQ ID NO: 152 - protein, 428 aa, Artificial Sequence
  Description of Artificial Sequence: Synthetic polypeptide
RNLPVATPDPGMFPCLHHSQNLLRAVSNMLQKARQTLEFYPCTSEEIDHEDITKDKTSTVEACLPLELTKNESCLNSRETSFITNGSCLASRKTSFMMALCLSSIYEDLKMYQVEFKTMNAKLLMDPKRQIFLDQNMLAVIDELMQALNFNSETVPQKSSLEEPDFYKTKIKLCILLHAFRIRAVTIDRVMSYLNASEPKSSDKTHTCPPCPAPELLGGPSVFLFPPKPKDTLMISRTPEVTCVVVDVSHEDPEVKFNWYVDGVEVHNAKTKPREEQYNSTYRVVSVLTVLHQDWLNGKEYKCKVSNKALPAPIEKTISKAKGQPREPRVYTLPPCRDELTKNQVSLTCLVKGFYPSDIAVEWESNGQPENNYKTTPPVLVSDGSFTLYSKLTVDKSRWQQGNVFSCSVMHEALHNHYTQKSLSLSPG

SEQ ID NO: 153 - protein, 537 aa, Artificial Sequence; identical to SEQ ID NO: 137
  Description of Artificial Sequence: Synthetic polypeptide

SEQ ID NO: 154 - protein, 433 aa, Artificial Sequence
  Description of Artificial Sequence: Synthetic polypeptide
RNLPVATPDPGMFPCLHHSQNLLRAVSNMLQKARQTLEFYPCTSEEIDHEDITKDKTSTVEACLPLELTKNESCLNSRETSFITNGSCLASRKTSFMMALCLSSIYEDLKMYQVEFKTMNAKLLMDPKRQIFLDQNMLAVIDELMQALNFNSETVPQKSSLEEPDFYKTKIKLCILLHAFRIRAVTIDRVMSYLNASGGGGSEPKSSDKTHTCPPCPAPELLGGPSVFLFPPKPKDTLMISRTPEVTCVVVDVSHEDPEVKFNWYVDGVEVHNAKTKPREEQYNSTYRVVSVLTVLHQDWLNGKEYKCKVSNKALPAPIEKTISKAKGQPREPRVYTLPPCRDELTKNQVSLTCLVKGFYPSDIAVEWESNGQPENNYKTTPPVLVSDGSFTLYSKLTVDKSRWQQGNVFSCSVMHEALHNHYTQKSLSLSPG

SEQ ID NO: 155 - protein, 537 aa, Artificial Sequence; identical to SEQ ID NO: 137
  Description of Artificial Sequence: Synthetic polypeptide

SEQ ID NO: 156 - protein, 438 aa, Artificial Sequence
  Description of Artificial Sequence: Synthetic polypeptide
RNLPVATPDPGMFPCLHHSQNLLRAVSNMLQKARQTLEFYPCTSEEIDHEDITKDKTSTVEACLPLELTKNESCLNSRETSFITNGSCLASRKTSFMMALCLSSIYEDLKMYQVEFKTMNAKLLMDPKRQIFLDQNMLAVIDELMQALNFNSETVPQKSSLEEPDFYKTKIKLCILLHAFRIRAVTIDRVMSYLNASGGGGSGGGGSEPKSSDKTHTCPPCPAPELLGGPSVFLFPPKPKDTLMISRTPEVTCVVVDVSHEDPEVKFNWYVDGVEVHNAKTKPREEQYNSTYRVVSVLTVLHQDWLNGKEYKCKVSNKALPAPIEKTISKAKGQPREPRVYTLPPCRDELTKNQVSLTCLVKGFYPSDIAVEWESNGQPENNYKTTPPVLVSDGSFTLYSKLTVDKSRWQQGNVFSCSVMHEALHNHYTQKSLSLSPG

SEQ ID NO: 157 - protein, 443 aa, Artificial Sequence
  Description of Artificial Sequence: Synthetic polypeptide
RNLPVATPDPGMFPCLHHSQNLLRAVSNMLQKARQTLEFYPCTSEEIDHEDITKDKTSTVEACLPLELTKNESCLNSRETSFITNGSCLASRKTSFMMALCLSSIYEDLKMYQVEFKTMNAKLLMDPKRQIFLDQNMLAVIDELMQALNFNSETVPQKSSLEEPDFYKTKIKLCILLHAFRIRAVTIDRVMSYLNASGGGGSGGGGSGGGGSEPKSSDKTHTCPPCPAPELLGGPSVFLFPPKPKDTLMISRTPEVTCVVVDVSHEDPEVKFNWYVDGVEVHNAKTKPREEQYNSTYRVVSVLTVLHQDWLNGKEYKCKVSNKALPAPIEKTISKAKGQPREPQVCTLPPSRDELTENQVSLTCLVKGFYPSDIAVEWESNGQPENNYKTTPPVLDSDGSFFLYSWLTVDKSRWQQGNVFSCSVMHEALHNHYTQKSLSLSPG

SEQ ID NO: 158 - protein, 537 aa, Artificial Sequence
  Description of Artificial Sequence: Synthetic polypeptide
IWELKKDVYVVELDWYPDAPGEMVVLTCDTPEEDGITWTLDQSSEVLGSGKTLTIQVKEFGDAGQYTCHKGGEVLSHSLLLLHKKEDGIWSTDILKDQKEPKNKTFLRCEAKNYSGRFTCWWLTTISTDLTFSVKSSRGSSDPQGVTCGAATLSAERVRGDNKEYEYSVECQEDSACPAAEESLPIEVMVDAVHKLKYENYTSSFFIRDIIKPDPPKNLQLKPLKNSRQVEVSWEYPDTWSTPHSYFSLTFCVQVQGKSKREKKDRVFTDKTSATVICRKNASISVRAQDRYYSSSWSEWASVPCSEPKSSDKTHTCPPCPAPELLGGPSVFLFPPKPKDTLMISRTPEVTCVVVDVSHEDPEVKFNWYVDGVEVHNAKTKPREEQYNSTYRVVSVLTVLHQDWLNGKEYKCKVSNKALPAPIEKTISKAKGQPREPRVYTLPPCRDELTKNQVSLTCLVKGFYPSDIAVEWESNGQPENNYKTTPPVLVSDGSFTLYSKLTVDKSRWQQGNVFSCSVMHEALHNHYTQKSLSLSPG

SEQ ID NO: 159 - protein, 542 aa, Artificial Sequence
  Description of Artificial Sequence: Synthetic polypeptide
IWELKKDVYVVELDWYPDAPGEMVVLTCDTPEEDGITWTLDQSSEVLGSGKTLTIQVKEFGDAGQYTCHKGGEVLSHSLLLLHKKEDGIWSTDILKDQKEPKNKTFLRCEAKNYSGRFTCWWLTTISTDLTFSVKSSRGSSDPQGVTCGAATLSAERVRGDNKEYEYSVECQEDSACPAAEESLPIEVMVDAVHKLKYENYTSSFFIRDIIKPDPPKNLQLKPLKNSRQVEVSWEYPDTWSTPHSYFSLTFCVQVQGKSKREKKDRVFTDKTSATVICRKNASISVRAQDRYYSSSWSEWASVPCSGGGGSEPKSSDKTHTCPPCPAPELLGGPSVFLFPPKPKDTLMISRTPEVTCVVVDVSHEDPEVKFNWYVDGVEVHNAKTKPREEQYNSTYRVVSVLTVLHQDWLNGKEYKCKVSNKALPAPIEKTISKAKGQPREPQVCTLPPSRDELTENQVSLTCLVKGFYPSDIAVEWESNGQPENNYKTTPPVLDSDGSFFLYSWLTVDKSRWQQGNVFSCSVMHEALHNHYTQKSLSLSPG

SEQ ID NO: 160 - protein, 433 aa, Artificial Sequence; identical to SEQ ID NO: 154
  Description of Artificial Sequence: Synthetic polypeptide

SEQ ID NO: 161 - protein, 542 aa, Artificial Sequence
  Description of Artificial Sequence: Synthetic polypeptide
IWELKKDVYVVELDWYPDAPGEMVVLTCDTPEEDGITWTLDQSSEVLGSGKTLTIQVKEFGDAGQYTCHKGGEVLSHSLLLLHKKEDGIWSTDILKDQKEPKNKTFLRCEAKNYSGRFTCWWLTTISTDLTFSVKSSRGSSDPQGVTCGAATLSAERVRGDNKEYEYSVECQEDSASPAAEESLPIEVMVDAVHKLKYENYTSSFFIRDIIKPDPPKNLQLKPLKNSRQVEVSWEYPDTWSTPHSYFSLTFCVQVQGKSKREKKDRVFTDKTSATVICRKNASISVRAQDRCYSSSWSEWASVPCSGGGGSEPKSSDKTHTCPPCPAPELLGGPSVFLFPPKPKDTLMISRTPEVTCVVVDVSHEDPEVKFNWYVDGVEVHNAKTKPREEQYNSTYRVVSVLTVLHQDWLNGKEYKCKVSNKALPAPIEKTISKAKGQPREPQVCTLPPSRDELTENQVSLTCLVKGFYPSDIAVEWESNGQPENNYKTTPPVLDSDGSFFLYSWLTVDKSRWQQGNVFSCSVMHEALHNHYTQKSLSLSPG

SEQ ID NO: 162 - protein, 433 aa, Artificial Sequence
  Description of Artificial Sequence: Synthetic polypeptide
RNLPVATPDPGMFPCLHHSQNLLRAVSNMLQKARQTLEFYPCTSEEIDHEDITKDKTSTVEACLPLELTKNESSLNSRETSFITNGSCLASRKTSFMMALCLSSIYEDLKMYQVEFKTMNAKLLMDPKRQIFLDQNMLAVIDELMQALNFNSETVPQKSSLEEPDFYKTKIKLCILLHAFRIRACTIDRVMSYLNASGGGGSEPKSSDKTHTCPPCPAPELLGGPSVFLFPPKPKDTLMISRTPEVTCVVVDVSHEDPEVKFNWYVDGVEVHNAKTKPREEQYNSTYRVVSVLTVLHQDWLNGKEYKCKVSNKALPAPIEKTISKAKGQPREPRVYTLPPCRDELTKNQVSLTCLVKGFYPSDIAVEWESNGQPENNYKTTPPVLVSDGSFTLYSKLTVDKSRWQQGNVFSCSVMHEALHNHYTQKSLSLSPG

SEQ ID NO: 163 - protein, 536 aa, Artificial Sequence
  Description of Artificial Sequence: Synthetic polypeptide
IWELKKDVYVVELDWYPDAPGEMVVLTCDTPEEDGITWTLDQSSEVLGSGKTLTIQVKEFGDAGQYTCHKGGEVLSHSLLLLHKKEDGIWSTDILKDQKEPKNKTFLRCEAKNYSGRFTCWWLTTISTDLTFSVKSSRGSSDPQGVTCGAATLSAERVRGDNKEYEYSVECQEDSASPAAEESLPIEVMVDAVHKLKYENYTSSFFIRDIIKPDPPKNLQLKPLKNSRQVEVSWEYPDTWSTPHSYFSLTFCVQVQGKSKREKKDRVFTDKTSATVICRKNASISVRAQDRCYSSSWSEWASVPCSRVESKYGPPCPPCPAPEFLGGPSVFLFPPKPKDTLMISRTPEVTCVVVDVSQEDPEVQFNWYVDGVEVHNAKTKPREEQFNSTYRVVSVLTVLHQDWLNGKEYKCKVSNKGLPSSIEKTISKAKGQPREPQVCTLPPSQEEMTKNQVSLTCLVEGFYPSDIAVEWESNGQPENNYKTTPPVLDSDGSFFLYSWLTVDKSRWQEGNVFSCSVMHEALHNHYTQKSLSLSLG

SEQ ID NO: 164 - protein, 442 aa, Artificial Sequence
  Description of Artificial Sequence: Synthetic polypeptide
RNLPVATPDPGMFPCLHHSQNLLRAVSNMLQKARQTLEFYPCTSEEIDHEDITKDKTSTVEACLPLELTKNESSLNSRETSFITNGSCLASRKTSFMMALCLSSIYEDLKMYQVEFKTMNAKLLMDPKRQIFLDQNMLAVIDELMQALNFNSETVPQKSSLEEPDFYKTKIKLCILLHAFRIRACTIDRVMSYLNASGGGGSGGGGSGGGGSRVESKYGPPCPPCPAPEFLGGPSVFLFPPKPKDTLMISRTPEVTCVVVDVSQEDPEVQFNWYVDGVEVHNAKTKPREEQFNSTYRVVSVLTVLHQDWLNGKEYKCKVSNKGLPSSIEKTISKAKGQPREPQVYTLPPCQENMTKNQVSLTCLVKGFYPSDIAVEWESNGQPENNYKTTPPVLVSDGSFTLYSRLTVDKSRWQEGNVFSCSVMHEALHNHYTQKSLSLSLG

SEQ ID NO: 165 - protein, 536 aa, Artificial Sequence
  Description of Artificial Sequence: Synthetic polypeptide
IWELKKDVYVVELDWYPDAPGEMVVLTCDTPEEDGITWTLDQSSEVLGSGKTLTIQVKEFGDAGQYTCHKGGEVLSHSLLLLHKKEDGIWSTDILKDQKEPKNKTFLRCEAKNYSGRFTCWWLTTISTDLTFSVKSSRGSSDPQGVTCGAATLSAERVRGDNKEYEYSVECQEDSASPAAEESLPIEVMVDAVHKLKYENYTSSFFIRDIIKPDPPKNLQLKPLKNSRQVEVSWEYPDTWSTPHSYFSLTFCVQVQGKSKREKKDRVFTDKTSATVICRKNASISVRAQDRCYSSSWSEWASVPCSRVESKYGPPCPPCPAPEFLGGPSVFLFPPKPKDTLMISRTPEVTCVVVDVSQEDPEVQFNWYVDGVEVHNAKTKPREEQFNSTYRVVSVLTVLHQDWLNGKEYKCKVSNKGLPSSIEKTISKAKGQPREPQVCTLPPSQEEMTENQVSLTCLVKGFYPSDIAVEWESNGQPENNYKTTPPVLDSDGSFFLYSWLTVDKSRWQEGNVFSCSVMHEALHNHYTQKSLSLSLG

SEQ ID NO: 166 - protein, 442 aa, Artificial Sequence
  Description of Artificial Sequence: Synthetic polypeptide
RNLPVATPDPGMFPCLHHSQNLLRAVSNMLQKARQTLEFYPCTSEEIDHEDITKDKTSTVEACLPLELTKNESSLNSRETSFITNGSCLASRKTSFMMALCLSSIYEDLKMYQVEFKTMNAKLLMDPKRQIFLDQNMLAVIDELMQALNFNSETVPQKSSLEEPDFYKTKIKLCILLHAFRIRACTIDRVMSYLNASGGGGSGGGGSGGGGSRVESKYGPPCPPCPAPEFLGGPSVFLFPPKPKDTLMISRTPEVTCVVVDVSQEDPEVQFNWYVDGVEVHNAKTKPREEQFNSTYRVVSVLTVLHQDWLNGKEYKCKVSNKGLPSSIEKTISKAKGQPREPRVYTLPPCQEEMTKNQVSLTCLVKGFYPSDIAVEWESNGQPENNYKTTPPVLVSDGSFTLYSRLTVDKSRWQEGNVFSCSVMHEALHNHYTQKSLSLSLG

SEQ ID NO: 167 - protein, 536 aa, Artificial Sequence
  Description of Artificial Sequence: Synthetic polypeptide
IWELKKDVYVVELDWYPDAPGEMVVLTCDTPEEDGITWTLDQSSEVLGSGKTLTIQVKEFGDAGQYTCHKGGEVLSHSLLLLHKKEDGIWSTDILKDQKEPKNKTFLRCEAKNYSGRFTCWWLTTISTDLTFSVKSSRGSSDPQGVTCGAATLSAERVRGDNKEYEYSVECQEDSASPAAEESLPIEVMVDAVHKLKYENYTSSFFIRDIIKPDPPKNLQLKPLKNSRQVEVSWEYPDTWSTPHSYFSLTFCVQVQGKSKREKKDRVFTDKTSATVICRKNASISVRAQDRCYSSSWSEWASVPCSRVESKYGPPCPPCPAPEFEGGPSVFLFPPKPKDTLMISRTPEVTCVVVDVSQEDPEVQFNWYVDGVEVHNAKTKPREEQFNSTYRVVSVLTVLHQDWLNGKEYKCKVSNKGLPSSIEKTISKAKGQPREPQVCTLPPSQEEMTENQVSLTCLVKGFYPSDIAVEWESNGQPENNYKTTPPVLDSDGSFFLYSWLTVDKSRWQEGNVFSCSVMHEALHNHYTQKSLSLSLG

SEQ ID NO: 168 - protein, 442 aa, Artificial Sequence
  Description of Artificial Sequence: Synthetic polypeptide
RNLPVATPDPGMFPCLHHSQNLLRAVSNMLQKARQTLEFYPCTSEEIDHEDITKDKTSTVEACLPLELTKNESSLNSRETSFITNGSCLASRKTSFMMALCLSSIYEDLKMYQVEFKTMNAKLLMDPKRQIFLDQNMLAVIDELMQALNFNSETVPQKSSLEEPDFYKTKIKLCILLHAFRIRACTIDRVMSYLNASGGGGSGGGGSGGGGSRVESKYGPPCPPCPAPEFEGGPSVFLFPPKPKDTLMISRTPEVTCVVVDVSQEDPEVQFNWYVDGVEVHNAKTKPREEQFNSTYRVVSVLTVLHQDWLNGKEYKCKVSNKGLPSSIEKTISKAKGQPREPRVYTLPPCQEEMTKNQVSLTCLVKGFYPSDIAVEWESNGQPENNYKTTPPVLVSDGSFTLYSRLTVDKSRWQEGNVFSCSVMHEALHNHYTQKSLSLSLG

SEQ ID NO: 169 - protein, 536 aa, Artificial Sequence
  Description of Artificial Sequence: Synthetic polypeptide
IWELKKDVYVVELDWYPDAPGEMVVLTCDTPEEDGITWTLDQSSEVLGSGKTLTIQVKEFGDAGQYTCHKGGEVLSHSLLLLHKKEDGIWSTDILKDQKEPKNKTFLRCEAKNYSGRFTCWWLTTISTDLTFSVKSSRGSSDPQGVTCGAATLSAERVRGDNKEYEYSVECQEDSASPAAEESLPIEVMVDAVHKLKYENYTSSFFIRDIIKPDPPKNLQLKPLKNSRQVEVSWEYPDTWSTPHSYFSLTFCVQVQGKSKREKKDRVFTDKTSATVICRKNASISVRAQDRCYSSSWSEWASVPCSRVESKYGPPCPPCPAPEFEGGPSVFLFPPKPKDTLMISRTPEVTCVVVDVSQEDPEVQFNWYVDGVEVHNAKTKPREEQFNSTYRVVSVLTVLHQDWLNGKEYKCKVSNKGLASSIEKTISKAKGQPREPQVCTLPPSQEEMTENQVSLTCLVKGFYPSDIAVEWESNGQPENNYKTTPPVLDSDGSFFLYSWLTVDKSRWQEGNVFSCSVMHEALHNHYTQKSLSLSLG

SEQ ID NO: 170 - protein, 442 aa, Artificial Sequence
  Description of Artificial Sequence: Synthetic polypeptide
RNLPVATPDPGMFPCLHHSQNLLRAVSNMLQKARQTLEFYPCTSEEIDHEDITKDKTSTVEACLPLELTKNESSLNSRETSFITNGSCLASRKTSFMMALCLSSIYEDLKMYQVEFKTMNAKLLMDPKRQIFLDQNMLAVIDELMQALNFNSETVPQKSSLEEPDFYKTKIKLCILLHAFRIRACTIDRVMSYLNASGGGGSGGGGSGGGGSRVESKYGPPCPPCPAPEFEGGPSVFLFPPKPKDTLMISRTPEVTCVVVDVSQEDPEVQFNWYVDGVEVHNAKTKPREEQFNSTYRVVSVLTVLHQDWLNGKEYKCKVSNKGLASSIEKTISKAKGQPREPRVYTLPPCQEEMTKNQVSLTCLVKGFYPSDIAVEWESNGQPENNYKTTPPVLVSDGSFTLYSRLTVDKSRWQEGNVFSCSVMHEALHNHYTQKSLSLSLG

SEQ ID NO: 171 - protein, 537 aa, Artificial Sequence
  Description of Artificial Sequence: Synthetic polypeptide
IWELKKDVYVVELDWYPDAPGEMVVLTCDTPEEDGITWTLDQSSEVLGSGKTLTIQVKEFGDAGQYTCHKGGEVLSHSLLLLHKKEDGIWSTDILKDQKEPKNKTFLRCEAKNYSGRFTCWWLTTISTDLTFSVKSSRGSSDPQGVTCGAATLSAERVRGDNKEYEYSVECQEDSASPAAEESLPIEVMVDAVHKLKYENYTSSFFIRDIIKPDPPKNLQLKPLKNSRQVEVSWEYPDTWSTPHSYFSLTFCVQVQGKSKREKKDRVFTDKTSATVICRKNASISVRAQDRCYSSSWSEWASVPCSEPKSSDKTHTCPPCPAPELLGGPSVFLFPPKPKDTLMISRTPEVTCVVVDVSHEDPEVKFNWYVDGVEVHNAKTKPREEQYNSTYRVVSVLTVLHQDWLNGKEYKCKVSNKALPAPIEKTISKAKGQPREPQVCTLPPSRDELTENQVSLTCLVKGFYPSDIAVEWESNGQPENNYKTTPPVLDSDGSFFLYSWLTVDKSRWQQGNVFSCSVMHEALHNHYTQKSLSLSPG

SEQ ID NO: 172 - protein, 443 aa, Artificial Sequence
  Description of Artificial Sequence: Synthetic polypeptide
RNLPVATPDPGMFPCLHHSQNLLRAVSNMLQKARQTLEFYPCTSEEIDHEDITKDKTSTVEACLPLELTKNESSLNSRETSFITNGSCLASRKTSFMMALCLSSIYEDLKMYQVEFKTMNAKLLMDPKRQIFLDQNMLAVIDELMQALNFNSETVPQKSSLEEPDFYKTKIKLCILLHAFRIRACTIDRVMSYLNASGGGGSGGGGSGGGGSEPKSSDKTHTCPPCPAPELLGGPSVFLFPPKPKDTLMISRTPEVTCVVVDVSHEDPEVKFNWYVDGVEVHNAKTKPREEQYNSTYRVVSVLTVLHQDWLNGKEYKCKVSNKALPAPIEKTISKAKGQPREPRVYTLPPCRDELTKNQVSLTCLVKGFYPSDIAVEWESNGQPENNYKTTPPVLVSDGSFTLYSKLTVDKSRWQQGNVFSCSVMHEALHNHYTQKSLSLSPG

SEQ ID NO: 173 - protein, 537 aa, Artificial Sequence
  Description of Artificial Sequence: Synthetic polypeptide
IWELKKDVYVVELDWYPDAPGEMVVLTCDTPEEDGITWTLDQSSEVLGSGKTLTIQVKEFGDAGQYTCHKGGEVLSHSLLLLHKKEDGIWSTDILKDQKEPKNKTFLRCEAKNYSGRFTCWWLTTISTDLTFSVKSSRGSSDPQGVTCGAATLSAERVRGDNKEYEYSVECQEDSASPAAEESLPIEVMVDAVHKLKYENYTSSFFIRDIIKPDPPKNLQLKPLKNSRQVEVSWEYPDTWSTPHSYFSLTFCVQVQGKSKREKKDRVFTDKTSATVICRKNASISVRAQDRCYSSSWSEWASVPCSEPKSSDKTHTCPPCPAPEAAGGPSVFLFPPKPKDTLMISRTPEVTCVVVDVSHEDPEVKFNWYVDGVEVHNAKTKPREEQYNSTYRVVSVLTVLHQDWLNGKEYKCKVSNKALPAPIEKTISKAKGQPREPQVCTLPPSRDELTENQVSLTCLVKGFYPSDIAVEWESNGQPENNYKTTPPVLDSDGSFFLYSWLTVDKSRWQQGNVFSCSVMHEALHNHYTQKSLSLSPG

SEQ ID NO: 174 - protein, 443 aa, Artificial Sequence
  Description of Artificial Sequence: Synthetic polypeptide
RNLPVATPDPGMFPCLHHSQNLLRAVSNMLQKARQTLEFYPCTSEEIDHEDITKDKTSTVEACLPLELTKNESSLNSRETSFITNGSCLASRKTSFMMALCLSSIYEDLKMYQVEFKTMNAKLLMDPKRQIFLDQNMLAVIDELMQALNFNSETVPQKSSLEEPDFYKTKIKLCILLHAFRIRACTIDRVMSYLNASGGGGSGGGGSGGGGSEPKSSDKTHTCPPCPAPEAAGGPSVFLFPPKPKDTLMISRTPEVTCVVVDVSHEDPEVKFNWYVDGVEVHNAKTKPREEQYNSTYRVVSVLTVLHQDWLNGKEYKCKVSNKALPAPIEKTISKAKGQPREPRVYTLPPCRDELTKNQVSLTCLVKGFYPSDIAVEWESNGQPENNYKTTPPVLVSDGSFTLYSKLTVDKSRWQQGNVFSCSVMHEALHNHYTQKSLSLSPG

SEQ ID NO: 175 - protein, 537 aa, Artificial Sequence
  Description of Artificial Sequence: Synthetic polypeptide
IWELKKDVYVVELDWYPDAPGEMVVLTCDTPEEDGITWTLDQSSEVLGSGKTLTIQVKEFGDAGQYTCHKGGEVLSHSLLLLHKKEDGIWSTDILKDQKEPKNKTFLRCEAKNYSGRFTCWWLTTISTDLTFSVKSSRGSSDPQGVTCGAATLSAERVRGDNKEYEYSVECQEDSASPAAEESLPIEVMVDAVHKLKYENYTSSFFIRDIIKPDPPKNLQLKPLKNSRQVEVSWEYPDTWSTPHSYFSLTFCVQVQGKSKREKKDRVFTDKTSATVICRKNASISVRAQDRCYSSSWSEWASVPCSEPKSSDKTHTCPPCPAPEAAGGPSVFLFPPKPKDTLMISRTPEVTCVVVDVSHEDPEVKFNWYVDGVEVHNAKTKPREEQYNSTYRVVSVLTVLHQDWLNGKEYKCKVSNKALAAPIEKTISKAKGQPREPQVCTLPPSRDELTENQVSLTCLVKGFYPSDIAVEWESNGQPENNYKTTPPVLDSDGSFFLYSWLTVDKSRWQQGNVFSCSVMHEALHNHYTQKSLSLSPG

SEQ ID NO: 176 - protein, 443 aa, Artificial Sequence
  Description of Artificial Sequence: Synthetic polypeptide
RNLPVATPDPGMFPCLHHSQNLLRAVSNMLQKARQTLEFYPCTSEEIDHEDITKDKTSTVEACLPLELTKNESSLNSRETSFITNGSCLASRKTSFMMALCLSSIYEDLKMYQVEFKTMNAKLLMDPKRQIFLDQNMLAVIDELMQALNFNSETVPQKSSLEEPDFYKTKIKLCILLHAFRIRACTIDRVMSYLNASGGGGSGGGGSGGGGSEPKSSDKTHTCPPCPAPEAAGGPSVFLFPPKPKDTLMISRTPEVTCVVVDVSHEDPEVKFNWYVDGVEVHNAKTKPREEQYNSTYRVVSVLTVLHQDWLNGKEYKCKVSNKALAAPIEKTISKAKGQPREPRVYTLPPCRDELTKNQVSLTCLVKGFYPSDIAVEWESNGQPENNYKTTPPVLVSDGSFTLYSKLTVDKSRWQQGNVFSCSVMHEALHNHYTQKSLSLSPG

SEQ ID NO: 177 - protein, 537 aa, Artificial Sequence
  Description of Artificial Sequence: Synthetic polypeptide
IWELKKDVYVVELDWYPDAPGEMVVLTCDTPEEDGITWTLDQSSEVLGSGKTLTIQVKEFGDAGQYTCHKGGEVLSHSLLLLHKKEDGIWSTDILKDQKEPKNKTFLRCEAKNYSGRFTCWWLTTISTDLTFSVKSSRGSSDPQGVTCGAATLSAERVRGDNKEYEYSVECQEDSASPAAEESLPIEVMVDAVHKLKYENYTSSFFIRDIIKPDPPKNLQLKPLKNSRQVEVSWEYPDTWSTPHSYFSLTFCVQVQGKSKREKKDRVFTDKTSATVICRKNASISVRAQDRCYSSSWSEWASVPCSEPKSSDKTHTCPPCPAPEAEGAPSVFLFPPKPKDTLMISRTPEVTCVVVDVSHEDPEVKFNWYVDGVEVHNAKTKPREEQYNSTYRVVSVLTVLHQDWLNGKEYKCKVSNKALPSSIEKTISKAKGQPREPQVCTLPPSRDELTENQVSLTCLVKGFYPSDIAVEWESNGQPENNYKTTPPVLDSDGSFFLYSWLTVDKSRWQQGNVFSCSVMHEALHNHYTQKSLSLSPG

SEQ ID NO: 178 - protein, 443 aa, Artificial Sequence
  Description of Artificial Sequence: Synthetic polypeptide
RNLPVATPDPGMFPCLHHSQNLLRAVSNMLQKARQTLEFYPCTSEEIDHEDITKDKTSTVEACLPLELTKNESSLNSRETSFITNGSCLASRKTSFMMALCLSSIYEDLKMYQVEFKTMNAKLLMDPKRQIFLDQNMLAVIDELMQALNFNSETVPQKSSLEEPDFYKTKIKLCILLHAFRIRACTIDRVMSYLNASGGGGSGGGGSGGGGSEPKSSDKTHTCPPCPAPEAEGAPSVFLFPPKPKDTLMISRTPEVTCVVVDVSHEDPEVKFNWYVDGVEVHNAKTKPREEQYNSTYRVVSVLTVLHQDWLNGKEYKCKVSNKALPSSIEKTISKAKGQPREPRVYTLPPCRDELTKNQVSLTCLVKGFYPSDIAVEWESNGQPENNYKTTPPVLVSDGSFTLYSKLTVDKSRWQQGNVFSCSVMHEALHNHYTQKSLSLSPG

SEQ ID NO: 179 - protein, 536 aa, Artificial Sequence
  Description of Artificial Sequence: Synthetic polypeptide
IWELKKDVYVVELDWYPDAPGEMVVLTCDTPEEDGITWTLDQSSEVLGSGKTLTIQVKEFGDAGQYTCHKGGEVLSHSLLLLHKKEDGIWSTDILKDQKEPKNKTFLRCEAKNYSGRFTCWWLTTISTDLTFSVKSSRGSSDPQGVTCGAATLSAERVRGDNKEYEYSVECQEDSACPAAEESLPIEVMVDAVHKLKYENYTSSFFIRDIIKPDPPKNLQLKPLKNSRQVEVSWEYPDTWSTPHSYFSLTFCVQVQGKSKREKKDRVFTDKTSATVICRKNASISVRAQDRCYSSSWSEWASVPCSRVESKYGPPCPPCPAPEFLGGPSVFLFPPKPKDTLMISRTPEVTCVVVDVSQEDPEVQFNWYVDGVEVHNAKTKPREEQFNSTYRVVSVLTVLHQDWLNGKEYKCKVSNKGLPSSIEKTISKAKGQPREPQVCTLPPSQEEMTKNQVSLTCLVEGFYPSDIAVEWESNGQPENNYKTTPPVLDSDGSFFLYSWLTVDKSRWQEGNVFSCSVMHEALHNHYTQKSLSLSLG

SEQ ID NO: 180 - protein, 442 aa, Artificial Sequence
  Description of Artificial Sequence: Synthetic polypeptide
RNLPVATPDPGMFPCLHHSQNLLRAVSNMLQKARQTLEFYPCTSEEIDHEDITKDKTSTVEACLPLELTKNESCLNSRETSFITNGSCLASRKTSFMMALCLSSIYEDLKMYQVEFKTMNAKLLMDPKRQIFLDQNMLAVIDELMQALNFNSETVPQKSSLEEPDFYKTKIKLCILLHAFRIRACTIDRVMSYLNASGGGGSGGGGSGGGGSRVESKYGPPCPPCPAPEFLGGPSVFLFPPKPKDTLMISRTPEVTCVVVDVSQEDPEVQFNWYVDGVEVHNAKTKPREEQFNSTYRVVSVLTVLHQDWLNGKEYKCKVSNKGLPSSIEKTISKAKGQPREPQVYTLPPCQENMTKNQVSLTCLVKGFYPSDIAVEWESNGQPENNYKTTPPVLVSDGSFTLYSRLTVDKSRWQEGNVFSCSVMHEALHNHYTQKSLSLSLG

SEQ ID NO: 181 - protein, 536 aa, Artificial Sequence
  Description of Artificial Sequence: Synthetic polypeptide
IWELKKDVYVVELDWYPDAPGEMVVLTCDTPEEDGITWTLDQSSEVLGSGKTLTIQVKEFGDAGQYTCHKGGEVLSHSLLLLHKKEDGIWSTDILKDQKEPKNKTFLRCEAKNYSGRFTCWWLTTISTDLTFSVKSSRGSSDPQGVTCGAATLSAERVRGDNKEYEYSVECQEDSACPAAEESLPIEVMVDAVHKLKYENYTSSFFIRDIIKPDPPKNLQLKPLKNSRQVEVSWEYPDTWSTPHSYFSLTFCVQVQGKSKREKKDRVFTDKTSATVICRKNASISVRAQDRCYSSSWSEWASVPCSRVESKYGPPCPPCPAPEFLGGPSVFLFPPKPKDTLMISRTPEVTCVVVDVSQEDPEVQFNWYVDGVEVHNAKTKPREEQFNSTYRVVSVLTVLHQDWLNGKEYKCKVSNKGLPSSIEKTISKAKGQPREPQVCTLPPSQEEMTENQVSLTCLVKGFYPSDIAVEWESNGQPENNYKTTPPVLDSDGSFFLYSWLTVDKSRWQEGNVFSCSVMHEALHNHYTQKSLSLSLG

SEQ ID NO: 182 - protein, 442 aa, Artificial Sequence
  Description of Artificial Sequence: Synthetic polypeptide
RNLPVATPDPGMFPCLHHSQNLLRAVSNMLQKARQTLEFYPCTSEEIDHEDITKDKTSTVEACLPLELTKNESCLNSRETSFITNGSCLASRKTSFMMALCLSSIYEDLKMYQVEFKTMNAKLLMDPKRQIFLDQNMLAVIDELMQALNFNSETVPQKSSLEEPDFYKTKIKLCILLHAFRIRACTIDRVMSYLNASGGGGSGGGGSGGGGSRVESKYGPPCPPCPAPEFLGGPSVFLFPPKPKDTLMISRTPEVTCVVVDVSQEDPEVQFNWYVDGVEVHNAKTKPREEQFNSTYRVVSVLTVLHQDWLNGKEYKCKVSNKGLPSSIEKTISKAKGQPREPRVYTLPPCQEEMTKNQVSLTCLVKGFYPSDIAVEWESNGQPENNYKTTPPVLVSDGSFTLYSRLTVDKSRWQEGNVFSCSVMHEALHNHYTQKSLSLSLG

SEQ ID NO: 183 - protein, 536 aa, Artificial Sequence
  Description of Artificial Sequence: Synthetic polypeptide
IWELKKDVYVVELDWYPDAPGEMVVLTCDTPEEDGITWTLDQSSEVLGSGKTLTIQVKEFGDAGQYTCHKGGEVLSHSLLLLHKKEDGIWSTDILKDQKEPKNKTFLRCEAKNYSGRFTCWWLTTISTDLTFSVKSSRGSSDPQGVTCGAATLSAERVRGDNKEYEYSVECQEDSACPAAEESLPIEVMVDAVHKLKYENYTSSFFIRDIIKPDPPKNLQLKPLKNSRQVEVSWEYPDTWSTPHSYFSLTFCVQVQGKSKREKKDRVFTDKTSATVICRKNASISVRAQDRCYSSSWSEWASVPCSRVESKYGPPCPPCPAPEFEGGPSVFLFPPKPKDTLMISRTPEVTCVVVDVSQEDPEVQFNWYVDGVEVHNAKTKPREEQFNSTYRVVSVLTVLHQDWLNGKEYKCKVSNKGLPSSIEKTISKAKGQPREPQVCTLPPSQEEMTENQVSLTCLVKGFYPSDIAVEWESNGQPENNYKTTPPVLDSDGSFFLYSWLTVDKSRWQEGNVFSCSVMHEALHNHYTQKSLSLSLG

SEQ ID NO: 184 - protein, 442 aa, Artificial Sequence
  Description of Artificial Sequence: Synthetic polypeptide
RNLPVATPDPGMFPCLHHSQNLLRAVSNMLQKARQTLEFYPCTSEEIDHEDITKDKTSTVEACLPLELTKNESCLNSRETSFITNGSCLASRKTSFMMALCLSSIYEDLKMYQVEFKTMNAKLLMDPKRQIFLDQNMLAVIDELMQALNFNSETVPQKSSLEEPDFYKTKIKLCILLHAFRIRACTIDRVMSYLNASGGGGSGGGGSGGGGSRVESKYGPPCPPCPAPEFEGGPSVFLFPPKPKDTLMISRTPEVTCVVVDVSQEDPEVQFNWYVDGVEVHNAKTKPREEQFNSTYRVVSVLTVLHQDWLNGKEYKCKVSNKGLPSSIEKTISKAKGQPREPRVYTLPPCQEEMTKNQVSLTCLVKGFYPSDIAVEWESNGQPENNYKTTPPVLVSDGSFTLYSRLTVDKSRWQEGNVFSCSVMHEALHNHYTQKSLSLSLG

SEQ ID NO: 185 - protein, 536 aa, Artificial Sequence
  Description of Artificial Sequence: Synthetic polypeptide
IWELKKDVYVVELDWYPDAPGEMVVLTCDTPEEDGITWTLDQSSEVLGSGKTLTIQVKEFGDAGQYTCHKGGEVLSHSLLLLHKKEDGIWSTDILKDQKEPKNKTFLRCEAKNYSGRFTCWWLTTISTDLTFSVKSSRGSSDPQGVTCGAATLSAERVRGDNKEYEYSVECQEDSACPAAEESLPIEVMVDAVHKLKYENYTSSFFIRDIIKPDPPKNLQLKPLKNSRQVEVSWEYPDTWSTPHSYFSLTFCVQVQGKSKREKKDRVFTDKTSATVICRKNASISVRAQDRCYSSSWSEWASVPCSRVESKYGPPCPPCPAPEFEGGPSVFLFPPKPKDTLMISRTPEVTCVVVDVSQEDPEVQFNWYVDGVEVHNAKTKPREEQFNSTYRVVSVLTVLHQDWLNGKEYKCKVSNKGLASSIEKTISKAKGQPREPQVCTLPPSQEEMTENQVSLTCLVKGFYPSDIAVEWESNGQPENNYKTTPPVLDSDGSFFLYSWLTVDKSRWQEGNVFSCSVMHEALHNHYTQKSLSLSLG

SEQ ID NO: 186 - protein, 442 aa, Artificial Sequence
  Description of Artificial Sequence: Synthetic polypeptide
RNLPVATPDPGMFPCLHHSQNLLRAVSNMLQKARQTLEFYPCTSEEIDHEDITKDKTSTVEACLPLELTKNESCLNSRETSFITNGSCLASRKTSFMMALCLSSIYEDLKMYQVEFKTMNAKLLMDPKRQIFLDQNMLAVIDELMQALNFNSETVPQKSSLEEPDFYKTKIKLCILLHAFRIRACTIDRVMSYLNASGGGGSGGGGSGGGGSRVESKYGPPCPPCPAPEFEGGPSVFLFPPKPKDTLMISRTPEVTCVVVDVSQEDPEVQFNWYVDGVEVHNAKTKPREEQFNSTYRVVSVLTVLHQDWLNGKEYKCKVSNKGLASSIEKTISKAKGQPREPRVYTLPPCQEEMTKNQVSLTCLVKGFYPSDIAVEWESNGQPENNYKTTPPVLVSDGSFTLYSRLTVDKSRWQEGNVFSCSVMHEALHNHYTQKSLSLSLG

SEQ ID NO: 187 - protein, 537 aa, Artificial Sequence
  Description of Artificial Sequence: Synthetic polypeptide
IWELKKDVYVVELDWYPDAPGEMVVLTCDTPEEDGITWTLDQSSEVLGSGKTLTIQVKEFGDAGQYTCHKGGEVLSHSLLLLHKKEDGIWSTDILKDQKEPKNKTFLRCEAKNYSGRFTCWWLTTISTDLTFSVKSSRGSSDPQGVTCGAATLSAERVRGDNKEYEYSVECQEDSACPAAEESLPIEVMVDAVHKLKYENYTSSFFIRDIIKPDPPKNLQLKPLKNSRQVEVSWEYPDTWSTPHSYFSLTFCVQVQGKSKREKKDRVFTDKTSATVICRKNASISVRAQDRCYSSSWSEWASVPCSEPKSSDKTHTCPPCPAPELLGGPSVFLFPPKPKDTLMISRTPEVTCVVVDVSHEDPEVKFNWYVDGVEVHNAKTKPREEQYNSTYRVVSVLTVLHQDWLNGKEYKCKVSNKALPAPIEKTISKAKGQPREPQVCTLPPSRDELTENQVSLTCLVKGFYPSDIAVEWESNGQPENNYKTTPPVLDSDGSFFLYSWLTVDKSRWQQGNVFSCSVMHEALHNHYTQKSLSLSPG

SEQ ID NO: 188 - protein, 443 aa, Artificial Sequence
  Description of Artificial Sequence: Synthetic polypeptide
RNLPVATPDPGMFPCLHHSQNLLRAVSNMLQKARQTLEFYPCTSEEIDHEDITKDKTSTVEACLPLELTKNESCLNSRETSFITNGSCLASRKTSFMMALCLSSIYEDLKMYQVEFKTMNAKLLMDPKRQIFLDQNMLAVIDELMQALNFNSETVPQKSSLEEPDFYKTKIKLCILLHAFRIRACTIDRVMSYLNASGGGGSGGGGSGGGGSEPKSSDKTHTCPPCPAPELLGGPSVFLFPPKPKDTLMISRTPEVTCVVVDVSHEDPEVKFNWYVDGVEVHNAKTKPREEQYNSTYRVVSVLTVLHQDWLNGKEYKCKVSNKALPAPIEKTISKAKGQPREPRVYTLPPCRDELTKNQVSLTCLVKGFYPSDIAVEWESNGQPENNYKTTPPVLVSDGSFTLYSKLTVDKSRWQQGNVFSCSVMHEALHNHYTQKSLSLSPG

SEQ ID NO: 189 - protein, 537 aa, Artificial Sequence
  Description of Artificial Sequence: Synthetic polypeptide
IWELKKDVYVVELDWYPDAPGEMVVLTCDTPEEDGITWTLDQSSEVLGSGKTLTIQVKEFGDAGQYTCHKGGEVLSHSLLLLHKKEDGIWSTDILKDQKEPKNKTFLRCEAKNYSGRFTCWWLTTISTDLTFSVKSSRGSSDPQGVTCGAATLSAERVRGDNKEYEYSVECQEDSACPAAEESLPIEVMVDAVHKLKYENYTSSFFIRDIIKPDPPKNLQLKPLKNSRQVEVSWEYPDTWSTPHSYFSLTFCVQVQGKSKREKKDRVFTDKTSATVICRKNASISVRAQDRCYSSSWSEWASVPCSEPKSSDKTHTCPPCPAPEAAGGPSVFLFPPKPKDTLMISRTPEVTCVVVDVSHEDPEVKFNWYVDGVEVHNAKTKPREEQYNSTYRVVSVLTVLHQDWLNGKEYKCKVSNKALPAPIEKTISKAKGQPREPQVCTLPPSRDELTENQVSLTCLVKGFYPSDIAVEWESNGQPENNYKTTPPVLDSDGSFFLYSWLTVDKSRWQQGNVFSCSVMHEALHNHYTQKSLSLSPG

SEQ ID NO: 190 - protein, 443 aa, Artificial Sequence
  Description of Artificial Sequence: Synthetic polypeptide
RNLPVATPDPGMFPCLHHSQNLLRAVSNMLQKARQTLEFYPCTSEEIDHEDITKDKTSTVEACLPLELTKNESCLNSRETSFITNGSCLASRKTSFMMALCLSSIYEDLKMYQVEFKTMNAKLLMDPKRQIFLDQNMLAVIDELMQALNFNSETVPQKSSLEEPDFYKTKIKLCILLHAFRIRACTIDRVMSYLNASGGGGSGGGGSGGGGSEPKSSDKTHTCPPCPAPEAAGGPSVFLFPPKPKDTLMISRTPEVTCVVVDVSHEDPEVKFNWYVDGVEVHNAKTKPREEQYNSTYRVVSVLTVLHQDWLNGKEYKCKVSNKALPAPIEKTISKAKGQPREPRVYTLPPCRDELTKNQVSLTCLVKGFYPSDIAVEWESNGQPENNYKTTPPVLVSDGSFTLYSKLTVDKSRWQQGNVFSCSVMHEALHNHYTQKSLSLSPG

SEQ ID NO: 191 - protein, 537 aa, Artificial Sequence
  Description of Artificial Sequence: Synthetic polypeptide
IWELKKDVYVVELDWYPDAPGEMVVLTCDTPEEDGITWTLDQSSEVLGSGKTLTIQVKEFGDAGQYTCHKGGEVLSHSLLLLHKKEDGIWSTDILKDQKEPKNKTFLRCEAKNYSGRFTCWWLTTISTDLTFSVKSSRGSSDPQGVTCGAATLSAERVRGDNKEYEYSVECQEDSACPAAEESLPIEVMVDAVHKLKYENYTSSFFIRDIIKPDPPKNLQLKPLKNSRQVEVSWEYPDTWSTPHSYFSLTFCVQVQGKSKREKKDRVFTDKTSATVICRKNASISVRAQDRCYSSSWSEWASVPCSEPKSSDKTHTCPPCPAPEAAGGPSVFLFPPKPKDTLMISRTPEVTCVVVDVSHEDPEVKFNWYVDGVEVHNAKTKPREEQYNSTYRVVSVLTVLHQDWLNGKEYKCKVSNKALAAPIEKTISKAKGQPREPQVCTLPPSRDELTENQVSLTCLVKGFYPSDIAVEWESNGQPENNYKTTPPVLDSDGSFFLYSWLTVDKSRWQQGNVFSCSVMHEALHNHYTQKSLSLSPG

SEQ ID NO: 192 - protein, 443 aa, Artificial Sequence
  Description of Artificial Sequence: Synthetic polypeptide
RNLPVATPDPGMFPCLHHSQNLLRAVSNMLQKARQTLEFYPCTSEEIDHEDITKDKTSTVEACLPLELTKNESCLNSRETSFITNGSCLASRKTSFMMALCLSSIYEDLKMYQVEFKTMNAKLLMDPKRQIFLDQNMLAVIDELMQALNFNSETVPQKSSLEEPDFYKTKIKLCILLHAFRIRACTIDRVMSYLNASGGGGSGGGGSGGGGSEPKSSDKTHTCPPCPAPEAAGGPSVFLFPPKPKDTLMISRTPEVTCVVVDVSHEDPEVKFNWYVDGVEVHNAKTKPREEQYNSTYRVVSVLTVLHQDWLNGKEYKCKVSNKALAAPIEKTISKAKGQPREPRVYTLPPCRDELTKNQVSLTCLVKGFYPSDIAVEWESNGQPENNYKTTPPVLVSDGSFTLYSKLTVDKSRWQQGNVFSCSVMHEALHNHYTQKSLSLSPG

SEQ ID NO: 193 - protein, 537 aa, Artificial Sequence
  Description of Artificial Sequence: Synthetic polypeptide
IWELKKDVYVVELDWYPDAPGEMVVLTCDTPEEDGITWTLDQSSEVLGSGKTLTIQVKEFGDAGQYTCHKGGEVLSHSLLLLHKKEDGIWSTDILKDQKEPKNKTFLRCEAKNYSGRFTCWWLTTISTDLTFSVKSSRGSSDPQGVTCGAATLSAERVRGDNKEYEYSVECQEDSACPAAEESLPIEVMVDAVHKLKYENYTSSFFIRDIIKPDPPKNLQLKPLKNSRQVEVSWEYPDTWSTPHSYFSLTFCVQVQGKSKREKKDRVFTDKTSATVICRKNASISVRAQDRCYSSSWSEWASVPCSEPKSSDKTHTCPPCPAPEAEGAPSVFLFPPKPKDTLMISRTPEVTCVVVDVSHEDPEVKFNWYVDGVEVHNAKTKPREEQYNSTYRVVSVLTVLHQDWLNGKEYKCKVSNKALPSSIEKTISKAKGQPREPQVCTLPPSRDELTENQVSLTCLVKGFYPSDIAVEWESNGQPENNYKTTPPVLDSDGSFFLYSWLTVDKSRWQQGNVFSCSVMHEALHNHYTQKSLSLSPG

SEQ ID NO: 194 - protein, 443 aa, Artificial Sequence
  Description of Artificial Sequence: Synthetic polypeptide
RNLPVATPDPGMFPCLHHSQNLLRAVSNMLQKARQTLEFYPCTSEEIDHEDITKDKTSTVEACLPLELTKNESCLNSRETSFITNGSCLASRKTSFMMALCLSSIYEDLKMYQVEFKTMNAKLLMDPKRQIFLDQNMLAVIDELMQALNFNSETVPQKSSLEEPDFYKTKIKLCILLHAFRIRACTIDRVMSYLNASGGGGSGGGGSGGGGSEPKSSDKTHTCPPCPAPEAEGAPSVFLFPPKPKDTLMISRTPEVTCVVVDVSHEDPEVKFNWYVDGVEVHNAKTKPREEQYNSTYRVVSVLTVLHQDWLNGKEYKCKVSNKALPSSIEKTISKAKGQPREPRVYTLPPCRDELTKNQVSLTCLVKGFYPSDIAVEWESNGQPENNYKTTPPVLVSDGSFTLYSKLTVDKSRWQQGNVFSCSVMHEALHNHYTQKSLSLSPG

SEQ ID NO: 195 - protein, 537 aa, Artificial Sequence; identical to SEQ ID NO: 189
  Description of Artificial Sequence: Synthetic polypeptide

SEQ ID NO: 196 - protein, 443 aa, Artificial Sequence; identical to SEQ ID NO: 190
  Description of Artificial Sequence: Synthetic polypeptide

SEQ ID NO: 197 - protein, 537 aa, Artificial Sequence; identical to SEQ ID NO: 191
  Description of Artificial Sequence: Synthetic polypeptide

SEQ ID NO: 198 - protein, 443 aa, Artificial Sequence; identical to SEQ ID NO: 192
  Description of Artificial Sequence: Synthetic polypeptide

SEQ ID NO: 199 - protein, 537 aa, Artificial Sequence; identical to SEQ ID NO: 193
  Description of Artificial Sequence: Synthetic polypeptide

SEQ ID NO: 200 - protein, 443 aa, Artificial Sequence; identical to SEQ ID NO: 194
  Description of Artificial Sequence: Synthetic polypeptide

SEQ ID NO: 201 - protein, 306 aa, Artificial Sequence
  Description of Artificial Sequence: Synthetic polypeptide
IWELKKDVYVVELDWYPDAPGEMVVLTCDTPEEDGITWTLDQSSEVLGSGKTLTIQVKEFGDAGQYTCHKGGEVLSHSLLLLHKKEDGIWSTDILKDQKEPKNKTFLRCEAKNYSGRFTCWWLTTISTDLTFSVKSSRGSSDPQGVTCGAATLSAERVRGDNKEYEYSVECQEDSASPAAEESLPIEVMVDAVHKLKYENYTSSFFIRDIIKPDPPKNLQLKPLKNSRQVEVSWEYPDTWSTPHSYFSLTFCVQVQGKSKREKKDRVFTDKTSATVICRKNASISVRAQDRCYSSSWSEWASVPCS

SEQ ID NO: 202 - protein, 197 aa, Artificial Sequence
  Description of Artificial Sequence: Synthetic polypeptide
RNLPVATPDPGMFPCLHHSQNLLRAVSNMLQKARQTLEFYPCTSEEIDHEDITKDKTSTVEACLPLELTKNESSLNSRETSFITNGSCLASRKTSFMMALCLSSIYEDLKMYQVEFKTMNAKLLMDPKRQIFLDQNMLAVIDELMQALNFNSETVPQKSSLEEPDFYKTKIKLCILLHAFRIRACTIDRVMSYLNAS

SEQ ID NO: 203 - protein, 306 aa, Artificial Sequence
  Description of Artificial Sequence: Synthetic polypeptide
IWELKKDVYVVELDWYPDAPGEMVVLTCDTPEEDGITWTLDQSSEVLGSGKTLTIQVKEFGDAGQYTCHKGGEVLSHSLLLLHKKEDGIWSTDILKDQKEPKNKTFLRCEAKNYSGRFTCWWLTTISTDLTFSVKSSRGSSDPQGVTCGAATLSAERVRGDNKEYEYSVECQEDSACPAAEESLPIEVMVDAVHKLKYENYTSSFFIRDIIKPDPPKNLQLKPLKNSRQVEVSWEYPDTWSTPHSYFSLTFCVQVQGKSKREKKDRVFTDKTSATVICRKNASISVRAQDRCYSSSWSEWASVPCS

SEQ ID NO: 204 - protein, 197 aa, Artificial Sequence
  Description of Artificial Sequence: Synthetic polypeptide
RNLPVATPDPGMFPCLHHSQNLLRAVSNMLQKARQTLEFYPCTSEEIDHEDITKDKTSTVEACLPLELTKNESCLNSRETSFITNGSCLASRKTSFMMALCLSSIYEDLKMYQVEFKTMNAKLLMDPKRQIFLDQNMLAVIDELMQALNFNSETVPQKSSLEEPDFYKTKIKLCILLHAFRIRACTIDRVMSYLNAS

SEQ ID NO: 205 - protein, 208 aa, Unknown
  Description of Unknown: IgG4 Fc wild-type sequence
PSVFLFPPKPKDTLMISRTPEVTCVVVDVSQEDPEVQFNWYVDGVEVHNAKTKPREEQFNSTYRVVSVLTVLHQDWLNGKEYKCKVSNKGLPSSIEKTISKAKGQPREPQVYTLPPSQEEMTKNQVSLTCVKGFYPSDIAVEWESNGQPENNYKTTPPVLDSDGSFFLYSKLTVDKSRWQEGNVFSCSVMHEALHNHYTQKSLSLSLG

SEQ ID NO: 206 - protein, 208 aa, Artificial Sequence
  Description of Artificial Sequence: Synthetic polypeptide
PSVFLFPPKPKDTLMISRTPEVTCVVVDVSQEDPEVQFNWYVDGVEVHNAKTKPREEQFNSTYRVVSVLTVLHQDWLNGKEYKCKVSNKGLPSSIEKTISKAKGQPREPQVCTLPPSQEEMTKNQVSLTCVEGFYPSDIAVEWESNGQPENNYKTTPPVLDSDGSFFLYSWLTVDKSRWQEGNVFSCSVMHEALHNHYTQKSLSLSLG

SEQ ID NO: 207 - protein, 209 aa, Artificial Sequence
  Description of Artificial Sequence: Synthetic polypeptide
PSVFLFPPKPKDTLMISRTPEVTCVVVDVSQEDPEVQFNWYVDGVEVHNAKTKPREEQFNSTYRVVSVLTVLHQDWLNGKEYKCKVSNKGLPSSIEKTISKAKGQPREPQVYTLPPCQENMTKNQVSLTCLVKGFYPSDIAVEWESNGQPENNYKTTPPVLVSDGSFTLYSRLTVDKSRWQEGNVFSCSVMHEALHNHYTQKSLSLSLG

SEQ ID NO: 208 - protein, 209 aa, Artificial Sequence
  Description of Artificial Sequence: Synthetic polypeptide
PSVFLFPPKPKDTLMISRTPEVTCVVVDVSQEDPEVQFNWYVDGVEVHNAKTKPREEQFNSTYRVVSVLTVLHQDWLNGKEYKCKVSNKGLPSSIEKTISKAKGQPREPQVCTLPPSQEEMTENQVSLTCLVKGFYPSDIAVEWESNGQPENNYKTTPPVLDSDGSFFLYSWLTVDKSRWQEGNVFSCSVMHEALHNHYTQKSLSLSLG

SEQ ID NO: 209 - protein, 209 aa, Artificial Sequence
  Description of Artificial Sequence: Synthetic polypeptide
PSVFLFPPKPKDTLMISRTPEVTCVVVDVSQEDPEVQFNWYVDGVEVHNAKTKPREEQFNSTYRVVSVLTVLHQDWLNGKEYKCKVSNKGLPSSIEKTISKAKGQPREPRVYTLPPCQEEMTKNQVSLTCLVKGFYPSDIAVEWESNGQPENNYKTTPPVLVSDGSFTLYSRLTVDKSRWQEGNVFSCSVMHEALHNHYTQKSLSLSLG

SEQ ID NO: 210 - protein, 209 aa, Artificial Sequence
  Description of Artificial Sequence: Synthetic polypeptide
PSVFLFPPKPKDTLMISRTPEVTCVVVDVSQEDPEVQFNWYVDGVEVHNAKTKPREEQFNSTYRVVSVLTVLHQDWLNGKEYKCKVSNKGLASSIEKTISKAKGQPREPQVCTLPPSQEEMTENQVSLTCLVKGFYPSDIAVEWESNGQPENNYKTTPPVLDSDGSFFLYSWLTVDKSRWQEGNVFSCSVMHEALHNHYTQKSLSLSLG

SEQ ID NO: 211 - protein, 209 aa, Artificial Sequence
  Description of Artificial Sequence: Synthetic polypeptide
PSVFLFPPKPKDTLMISRTPEVTCVVVDVSQEDPEVQFNWYVDGVEVHNAKTKPREEQFNSTYRVVSVLTVLHQDWLNGKEYKCKVSNKGLASSIEKTISKAKGQPREPRVYTLPPCQEEMTKNQVSLTCLVKGFYPSDIAVEWESNGQPENNYKTTPPVLVSDGSFTLYSRLTVDKSRWQEGNVFSCSVMHEALHNHYTQKSLSLSLG

SEQ ID NO: 212 - protein, 209 aa, Unknown
  Description of Unknown: IgG1 Fc wild-type sequence
PSVFLFPPKPKDTLMISRTPEVTCVVVDVSHEDPEVKFNWYVDGVEVHNAKTKPREEQYNSTYRVVSVLTVLHQDWLNGKEYKCKVSNKALPAPIEKTISKAKGQPREPQVYTLPPSRDELTKNQVSLTCLVKGFYPSDIAVEWESNGQPENNYKTTPPVLDSDGSFFLYSKLTVDKSRWQQGNVFSCSVMHEALHNHYTQKSLSLSPG

SEQ ID NO: 213 - protein, 209 aa, Artificial Sequence
  Description of Artificial Sequence: Synthetic polypeptide
PSVFLFPPKPKDTLMISRTPEVTCVVVDVSHEDPEVKFNWYVDGVEVHNAKTKPREEQYNSTYRVVSVLTVLHQDWLNGKEYKCKVSNKALPAPIEKTISKAKGQPREPQVCTLPPSRDELTENQVSLTCLVKGFYPSDIAVEWESNGQPENNYKTTPPVLDSDGSFFLYSWLTVDKSRWQQGNVFSCSVMHEALHNHYTQKSLSLSPG

SEQ ID NO: 214 - protein, 209 aa, Artificial Sequence
  Description of Artificial Sequence: Synthetic polypeptide
PSVFLFPPKPKDTLMISRTPEVTCVVVDVSHEDPEVKFNWYVDGVEVHNAKTKPREEQYNSTYRVVSVLTVLHQDWLNGKEYKCKVSNKALPAPIEKTISKAKGQPREPRVYTLPPCRDELTKNQVSLTCLVKGFYPSDIAVEWESNGQPENNYKTTPPVLVSDGSFTLYSKLTVDKSRWQQGNVFSCSVMHEALHNHYTQKSLSLSPG

SEQ ID NO: 215 - protein, 209 aa, Artificial Sequence
  Description of Artificial Sequence: Synthetic polypeptide
PSVFLFPPKPKDTLMISRTPEVTCVVVDVSHEDPEVKFNWYVDGVEVHNAKTKPREEQYNSTYRVVSVLTVLHQDWLNGKEYKCKVSNKALAAPIEKTISKAKGQPREPQVCTLPPSRDELTENQVSLTCLVKGFYPSDIAVEWESNGQPENNYKTTPPVLDSDGSFFLYSWLTVDKSRWQQGNVFSCSVMHEALHNHYTQKSLSLSPG

SEQ ID NO: 216 - protein, 209 aa, Artificial Sequence
  Description of Artificial Sequence: Synthetic polypeptide
PSVFLFPPKPKDTLMISRTPEVTCVVVDVSHEDPEVKFNWYVDGVEVHNAKTKPREEQYNSTYRVVSVLTVLHQDWLNGKEYKCKVSNKALAAPIEKTISKAKGQPREPRVYTLPPCRDELTKNQVSLTCLVKGFYPSDIAVEWESNGQPENNYKTTPPVLVSDGSFTLYSKLTVDKSRWQQGNVFSCSVMHEALHNHYTQKSLSLSPG

SEQ ID NO: 217 - protein, 209 aa, Artificial Sequence
  Description of Artificial Sequence: Synthetic polypeptide
PSVFLFPPKPKDTLMISRTPEVTCVVVDVSHEDPEVKFNWYVDGVEVHNAKTKPREEQYNSTYRVVSVLTVLHQDWLNGKEYKCKVSNKALPSSIEKTISKAKGQPREPQVCTLPPSRDELTENQVSLTCLVKGFYPSDIAVEWESNGQPENNYKTTPPVLDSDGSFFLYSWLTVDKSRWQQGNVFSCSVMHEALHNHYTQKSLSLSPG

SEQ ID NO: 218 - protein, 209 aa, Artificial Sequence
  Description of Artificial Sequence: Synthetic polypeptide
PSVFLFPPKPKDTLMISRTPEVTCVVVDVSHEDPEVKFNWYVDGVEVHNAKTKPREEQYNSTYRVVSVLTVLHQDWLNGKEYKCKVSNKALPSSIEKTISKAKGQPREPRVYTLPPCRDELTKNQVSLTCLVKGFYPSDIAVEWESNGQPENNYKTTPPVLVSDGSFTLYSKLTVDKSRWQQGNVFSCSVMHEALHNHYTQKSLSLSPG

SEQ ID NO: 219 - protein, 230 aa, Artificial Sequence
  Description of Artificial Sequence: Synthetic polypeptide
RVESKYGPPCPPCPAPEFLGGPSVFLFPPKPKDTLMISRTPEVTCVVVDVSQEDPEVQFNWYVDGVEVHNAKTKPREEQFNSTYRVVSVLTVLHQDWLNGKEYKCKVSNKGLPSSIEKTISKAKGQPREPQVYTLPPSQEEMTKNQVSLTCLVKGFYPSDIAVEWESNGQPENNYKTTPPVLDSDGSFFLYSKLTVDKSRWQEGNVFSCSVMHEALHNHYTQKSLSLSLG

SEQ ID NO: 220 - protein, 230 aa, Artificial Sequence
  Description of Artificial Sequence: Synthetic polypeptide
RVESKYGPPCPPCPAPEFLGGPSVFLFPPKPKDTLMISRTPEVTCVVVDVSQEDPEVQFNWYVDGVEVHNAKTKPREEQFNSTYRVVSVLTVLHQDWLNGKEYKCKVSNKGLPSSIEKTISKAKGQPREPQVCTLPPSQEEMTKNQVSLTCLVEGFYPSDIAVEWESNGQPENNYKTTPPVLDSDGSFFLYSWLTVDKSRWQEGNVFSCSVMHEALHNHYTQKSLSLSLG

SEQ ID NO: 221 - protein, 230 aa, Artificial Sequence
  Description of Artificial Sequence: Synthetic polypeptide
RVESKYGPPCPPCPAPEFLGGPSVFLFPPKPKDTLMISRTPEVTCVVVDVSQEDPEVQFNWYVDGVEVHNAKTKPREEQFNSTYRVVSVLTVLHQDWLNGKEYKCKVSNKGLPSSIEKTISKAKGQPREPQVYTLPPCQENMTKNQVSLTCLVKGFYPSDIAVEWESNGQPENNYKTTPPVLVSDGSFTLYSRLTVDKSRWQEGNVFSCSVMHEALHNHYTQKSLSLSLG

SEQ ID NO: 222 - protein, 230 aa, Artificial Sequence
  Description of Artificial Sequence: Synthetic polypeptide
RVESKYGPPCPPCPAPEFLGGPSVFLFPPKPKDTLMISRTPEVTCVVVDVSQEDPEVQFNWYVDGVEVHNAKTKPREEQFNSTYRVVSVLTVLHQDWLNGKEYKCKVSNKGLPSSIEKTISKAKGQPREPQVCTLPPSQEEMTENQVSLTCLVKGFYPSDIAVEWESNGQPENNYKTTPPVLDSDGSFFLYSWLTVDKSRWQEGNVFSCSVMHEALHNHYTQKSLSLSLG

SEQ ID NO: 223 - protein, 230 aa, Artificial Sequence
  Description of Artificial Sequence: Synthetic polypeptide
RVESKYGPPCPPCPAPEFLGGPSVFLFPPKPKDTLMISRTPEVTCVVVDVSQEDPEVQFNWYVDGVEVHNAKTKPREEQFNSTYRVVSVLTVLHQDWLNGKEYKCKVSNKGLPSSIEKTISKAKGQPREPRVYTLPPCQEEMTKNQVSLTCLVKGFYPSDIAVEWESNGQPENNYKTTPPVLVSDGSFTLYSRLTVDKSRWQEGNVFSCSVMHEALHNHYTQKSLSLSLG

SEQ ID NO: 224 - protein, 230 aa, Artificial Sequence
  Description of Artificial Sequence: Synthetic polypeptide
RVESKYGPPCPPCPAPEFEGGPSVFLFPPKPKDTLMISRTPEVTCVVVDVSQEDPEVQFNWYVDGVEVHNAKTKPREEQFNSTYRVVSVLTVLHQDWLNGKEYKCKVSNKGLPSSIEKTISKAKGQPREPQVCTLPPSQEEMTENQVSLTCLVKGFYPSDIAVEWESNGQPENNYKTTPPVLDSDGSFFLYSWLTVDKSRWQEGNVFSCSVMHEALHNHYTQKSLSLSLG

SEQ ID NO: 225 - protein, 230 aa, Artificial Sequence
  Description of Artificial Sequence: Synthetic polypeptide
RVESKYGPPCPPCPAPEFEGGPSVFLFPPKPKDTLMISRTPEVTCVVVDVSQEDPEVQFNWYVDGVEVHNAKTKPREEQFNSTYRVVSVLTVLHQDWLNGKEYKCKVSNKGLPSSIEKTISKAKGQPREPRVYTLPPCQEEMTKNQVSLTCLVKGFYPSDIAVEWESNGQPENNYKTTPPVLVSDGSFTLYSRLTVDKSRWQEGNVFSCSVMHEALHNHYTQKSLSLSLG

SEQ ID NO: 226 - protein, 230 aa, Artificial Sequence
  Description of Artificial Sequence: Synthetic polypeptide
RVESKYGPPCPPCPAPEFEGGPSVFLFPPKPKDTLMISRTPEVTCVVVDVSQEDPEVQFNWYVDGVEVHNAKTKPREEQFNSTYRVVSVLTVLHQDWLNGKEYKCKVSNKGLASSIEKTISKAKGQPREPQVCTLPPSQEEMTENQVSLTCLVKGFYPSDIAVEWESNGQPENNYKTTPPVLDSDGSFFLYSWLTVDKSRWQEGNVFSCSVMHEALHNHYTQKSLSLSLG

SEQ ID NO: 227 - protein, 230 aa, Artificial Sequence
  Description of Artificial Sequence: Synthetic polypeptide
RVESKYGPPCPPCPAPEFEGGPSVFLFPPKPKDTLMISRTPEVTCVVVDVSQEDPEVQFNWYVDGVEVHNAKTKPREEQFNSTYRVVSVLTVLHQDWLNGKEYKCKVSNKGLASSIEKTISKAKGQPREPRVYTLPPCQEEMTKNQVSLTCLVKGFYPSDIAVEWESNGQPENNYKTTPPVLVSDGSFTLYSRLTVDKSRWQEGNVFSCSVMHEALHNHYTQKSLSLSLG

SEQ ID NO: 228 - protein, 231 aa, Artificial Sequence
  Description of Artificial Sequence: Synthetic polypeptide
EPKSSDKTHTCPPCPAPELLGGPSVFLFPPKPKDTLMISRTPEVTCVVVDVSHEDPEVKFNWYVDGVEVHNAKTKPREEQYNSTYRVVSVLTVLHQDWLNGKEYKCKVSNKALPAPIEKTISKAKGQPREPQVYTLPPSRDELTKNQVSLTCLVKGFYPSDIAVEWESNGQPENNYKTTPPVLDSDGSFFLYSKLTVDKSRWQQGNVFSCSVMHEALHNHYTQKSLSLSPG

SEQ ID NO: 229 - protein, 231 aa, Artificial Sequence
  Description of Artificial Sequence: Synthetic polypeptide
EPKSSDKTHTCPPCPAPELLGGPSVFLFPPKPKDTLMISRTPEVTCVVVDVSHEDPEVKFNWYVDGVEVHNAKTKPREEQYNSTYRVVSVLTVLHQDWLNGKEYKCKVSNKALPAPIEKTISKAKGQPREPQVCTLPPSRDELTENQVSLTCLVKGFYPSDIAVEWESNGQPENNYKTTPPVLDSDGSFFLYSWLTVDKSRWQQGNVFSCSVMHEALHNHYTQKSLSLSPG

SEQ ID NO: 230 - protein, 231 aa, Artificial Sequence
  Description of Artificial Sequence: Synthetic polypeptide
EPKSSDKTHTCPPCPAPELLGGPSVFLFPPKPKDTLMISRTPEVTCVVVDVSHEDPEVKFNWYVDGVEVHNAKTKPREEQYNSTYRVVSVLTVLHQDWLNGKEYKCKVSNKALPAPIEKTISKAKGQPREPRVYTLPPCRDELTKNQVSLTCLVKGFYPSDIAVEWESNGQPENNYKTTPPVLVSDGSFTLYSKLTVDKSRWQQGNVFSCSVMHEALHNHYTQKSLSLSPG

SEQ ID NO: 231 - protein, 231 aa, Artificial Sequence
  Description of Artificial Sequence: Synthetic polypeptide
EPKSSDKTHTCPPCPAPEAAGGPSVFLFPPKPKDTLMISRTPEVTCVVVDVSHEDPEVKFNWYVDGVEVHNAKTKPREEQYNSTYRVVSVLTVLHQDWLNGKEYKCKVSNKALPAPIEKTISKAKGQPREPQVCTLPPSRDELTENQVSLTCLVKGFYPSDIAVEWESNGQPENNYKTTPPVLDSDGSFFLYSWLTVDKSRWQQGNVFSCSVMHEALHNHYTQKSLSLSPG

SEQ ID NO: 232 - protein, 231 aa, Artificial Sequence
  Description of Artificial Sequence: Synthetic polypeptide
EPKSSDKTHTCPPCPAPEAAGGPSVFLFPPKPKDTLMISRTPEVTCVVVDVSHEDPEVKFNWYVDGVEVHNAKTKPREEQYNSTYRVVSVLTVLHQDWLNGKEYKCKVSNKALPAPIEKTISKAKGQPREPRVYTLPPCRDELTKNQVSLTCLVKGFYPSDIAVEWESNGQPENNYKTTPPVLVSDGSFTLYSKLTVDKSRWQQGNVFSCSVMHEALHNHYTQKSLSLSPG

SEQ ID NO: 233 - protein, 231 aa, Artificial Sequence
  Description of Artificial Sequence: Synthetic polypeptide
EPKSSDKTHTCPPCPAPEAAGGPSVFLFPPKPKDTLMISRTPEVTCVVVDVSHEDPEVKFNWYVDGVEVHNAKTKPREEQYNSTYRVVSVLTVLHQDWLNGKEYKCKVSNKALAAPIEKTISKAKGQPREPQVCTLPPSRDELTENQVSLTCLVKGFYPSDIAVEWESNGQPENNYKTTPPVLDSDGSFFLYSWLTVDKSRWQQGNVFSCSVMHEALHNHYTQKSLSLSPG

SEQ ID NO: 234 - protein, 231 aa, Artificial Sequence
  Description of Artificial Sequence: Synthetic polypeptide
EPKSSDKTHTCPPCPAPEAAGGPSVFLFPPKPKDTLMISRTPEVTCVVVDVSHEDPEVKFNWYVDGVEVHNAKTKPREEQYNSTYRVVSVLTVLHQDWLNGKEYKCKVSNKALAAPIEKTISKAKGQPREPRVYTLPPCRDELTKNQVSLTCLVKGFYPSDIAVEWESNGQPENNYKTTPPVLVSDGSFTLYSKLTVDKSRWQQGNVFSCSVMHEALHNHYTQKSLSLSPG

SEQ ID NO: 235 - protein, 231 aa, Artificial Sequence
  Description of Artificial Sequence: Synthetic polypeptide
EPKSSDKTHTCPPCPAPEAEGAPSVFLFPPKPKDTLMISRTPEVTCVVVDVSHEDPEVKFNWYVDGVEVHNAKTKPREEQYNSTYRVVSVLTVLHQDWLNGKEYKCKVSNKALPSSIEKTISKAKGQPREPQVCTLPPSRDELTENQVSLTCLVKGFYPSDIAVEWESNGQPENNYKTTPPVLDSDGSFFLYSWLTVDKSRWQQGNVFSCSVMHEALHNHYTQKSLSLSPG

SEQ ID NO: 236 - protein, 231 aa, Artificial Sequence
  Description of Artificial Sequence: Synthetic polypeptide
EPKSSDKTHTCPPCPAPEAEGAPSVFLFPPKPKDTLMISRTPEVTCVVVDVSHEDPEVKFNWYVDGVEVHNAKTKPREEQYNSTYRVVSVLTVLHQDWLNGKEYKCKVSNKALPSSIEKTISKAKGQPREPRVYTLPPCRDELTKNQVSLTCLVKGFYPSDIAVEWESNGQPENNYKTTPPVLVSDGSFTLYSKLTVDKSRWQQGNVFSCSVMHEALHNHYTQKSLSLSPG

SEQ ID NO: 237 - protein, 21 aa, Artificial Sequence
  Description of Artificial Sequence: Synthetic peptide
  MOD_RES (18)..(18): Leu or Ala
  MOD_RES (19)..(19): Leu, Glu or Ala
  MOD_RES (21)..(21): Ala or Gly
PKSSDKTHTCPPCPAPEXXGX

SEQ ID NO: 238 - protein, 21 aa, Artificial Sequence
  Description of Artificial Sequence: Synthetic peptide
PKSSDKTHTCPPCPAPELLGG

SEQ ID NO: 239 - protein, 21 aa, Artificial Sequence
  Description of Artificial Sequence: Synthetic peptide
PKSSDKTHTCPPCPAPEAAGG

SEQ ID NO: 240 - protein, 21 aa, Artificial Sequence
  Description of Artificial Sequence: Synthetic peptide
PKSSDKTHTCPPCPAPEAEGA

SEQ ID NO: 241 - protein, 36 aa, Artificial Sequence
  Description of Artificial Sequence: Synthetic polypeptide
GGGGSGGGGSGGGGSPKSSDKTHTCPPCPAPELLGG

SEQ ID NO: 242 - protein, 26 aa, Artificial Sequence
  Description of Artificial Sequence: Synthetic peptide
GGGGSPKSSDKTHTCPPCPAPELLGG

SEQ ID NO: 243 - protein, 31 aa, Artificial Sequence
  Description of Artificial Sequence: Synthetic polypeptide
GGGGSGGGGSPKSSDKTHTCPPCPAPELLGG

SEQ ID NO: 244 - protein, 36 aa, Artificial Sequence
  Description of Artificial Sequence: Synthetic polypeptide
GGGGSGGGGSGGGGSPKSSDKTHTCPPCPAPEAAGG

SEQ ID NO: 245 - protein, 26 aa, Artificial Sequence
  Description of Artificial Sequence: Synthetic peptide
GGGGSPKSSDKTHTCPPCPAPEAAGG

SEQ ID NO: 246 - protein, 31 aa, Artificial Sequence
  Description of Artificial Sequence: Synthetic polypeptide
GGGGSGGGGSPKSSDKTHTCPPCPAPEAAGG

SEQ ID NO: 247 - protein, 36 aa, Artificial Sequence
  Description of Artificial Sequence: Synthetic polypeptide
GGGGSGGGGSGGGGSPKSSDKTHTCPPCPAPEAEGA

SEQ ID NO: 248 - protein, 26 aa, Artificial Sequence
  Description of Artificial Sequence: Synthetic peptide
GGGGSPKSSDKTHTCPPCPAPEAEGA

SEQ ID NO: 249 - protein, 31 aa, Artificial Sequence
  Description of Artificial Sequence: Synthetic polypeptide
GGGGSGGGGSPKSSDKTHTCPPCPAPEAEGA

SEQ ID NO: 250 - protein, 230 aa, Artificial Sequence
  Description of Artificial Sequence: Synthetic polypeptide
PKSSDKTHTCPPCPAPELLGGPSVFLFPPKPKDTLMISRTPEVTCVVVDVSHEDPEVKFNWYVDGVEVHNAKTKPREEQYNSTYRVVSVLTVLHQDWLNGKEYKCKVSNKALPAPIEKTISKAKGQPREPQVYTLPPSRDELTKNQVSLTCLVKGFYPSDIAVEWESNGQPENNYKTTPPVLDSDGSFFLYSKLTVDKSRWQQGNVFSCSVMHEALHNHYTQKSLSLSPG

SEQ ID NO: 251 - protein, 230 aa, Artificial Sequence
  Description of Artificial Sequence: Synthetic polypeptide
PKSSDKTHTCPPCPAPELLGGPSVFLFPPKPKDTLMISRTPEVTCVVVDVSHEDPEVKFNWYVDGVEVHNAKTKPREEQYNSTYRVVSVLTVLHQDWLNGKEYKCKVSNKALPAPIEKTISKAKGQPREPQVCTLPPSRDELTENQVSLTCLVKGFYPSDIAVEWESNGQPENNYKTTPPVLDSDGSFFLYSWLTVDKSRWQQGNVFSCSVMHEALHNHYTQKSLSLSPG

SEQ ID NO: 252 - protein, 230 aa, Artificial Sequence
  Description of Artificial Sequence: Synthetic polypeptide
PKSSDKTHTCPPCPAPELLGGPSVFLFPPKPKDTLMISRTPEVTCVVVDVSHEDPEVKFNWYVDGVEVHNAKTKPREEQYNSTYRVVSVLTVLHQDWLNGKEYKCKVSNKALPAPIEKTISKAKGQPREPRVYTLPPCRDELTKNQVSLTCLVKGFYPSDIAVEWESNGQPENNYKTTPPVLVSDGSFTLYSKLTVDKSRWQQGNVFSCSVMHEALHNHYTQKSLSLSPG

SEQ ID NO: 253 - protein, 230 aa, Artificial Sequence
  Description of Artificial Sequence: Synthetic polypeptide
PKSSDKTHTCPPCPAPEAAGGPSVFLFPPKPKDTLMISRTPEVTCVVVDVSHEDPEVKFNWYVDGVEVHNAKTKPREEQYNSTYRVVSVLTVLHQDWLNGKEYKCKVSNKALPAPIEKTISKAKGQPREPQVCTLPPSRDELTENQVSLTCLVKGFYPSDIAVEWESNGQPENNYKTTPPVLDSDGSFFLYSWLTVDKSRWQQGNVFSCSVMHEALHNHYTQKSLSLSPG

SEQ ID NO: 254 - protein, 230 aa, Artificial Sequence
  Description of Artificial Sequence: Synthetic polypeptide
PKSSDKTHTCPPCPAPEAAGGPSVFLFPPKPKDTLMISRTPEVTCVVVDVSHEDPEVKFNWYVDGVEVHNAKTKPREEQYNSTYRVVSVLTVLHQDWLNGKEYKCKVSNKALPAPIEKTISKAKGQPREPRVYTLPPCRDELTKNQVSLTCLVKGFYPSDIAVEWESNGQPENNYKTTPPVLVSDGSFTLYSKLTVDKSRWQQGNVFSCSVMHEALHNHYTQKSLSLSPG

SEQ ID NO: 255 - protein, 230 aa, Artificial Sequence
  Description of Artificial Sequence: Synthetic polypeptide
PKSSDKTHTCPPCPAPEAAGGPSVFLFPPKPKDTLMISRTPEVTCVVVDVSHEDPEVKFNWYVDGVEVHNAKTKPREEQYNSTYRVVSVLTVLHQDWLNGKEYKCKVSNKALAAPIEKTISKAKGQPREPQVCTLPPSRDELTENQVSLTCLVKGFYPSDIAVEWESNGQPENNYKTTPPVLDSDGSFFLYSWLTVDKSRWQQGNVFSCSVMHEALHNHYTQKSLSLSPG

SEQ ID NO: 256 - protein, 230 aa, Artificial Sequence
  Description of Artificial Sequence: Synthetic polypeptide
PKSSDKTHTCPPCPAPEAAGGPSVFLFPPKPKDTLMISRTPEVTCVVVDVSHEDPEVKFNWYVDGVEVHNAKTKPREEQYNSTYRVVSVLTVLHQDWLNGKEYKCKVSNKALAAPIEKTISKAKGQPREPRVYTLPPCRDELTKNQVSLTCLVKGFYPSDIAVEWESNGQPENNYKTTPPVLVSDGSFTLYSKLTVDKSRWQQGNVFSCSVMHEALHNHYTQKSLSLSPG

SEQ ID NO: 257 - protein, 230 aa, Artificial Sequence
  Description of Artificial Sequence: Synthetic polypeptide
PKSSDKTHTCPPCPAPEAEGAPSVFLFPPKPKDTLMISRTPEVTCVVVDVSHEDPEVKFNWYVDGVEVHNAKTKPREEQYNSTYRVVSVLTVLHQDWLNGKEYKCKVSNKALPSSIEKTISKAKGQPREPQVCTLPPSRDELTENQVSLTCLVKGFYPSDIAVEWESNGQPENNYKTTPPVLDSDGSFFLYSWLTVDKSRWQQGNVFSCSVMHEALHNHYTQKSLSLSPG

SEQ ID NO: 258 - protein, 230 aa, Artificial Sequence
  Description of Artificial Sequence: Synthetic polypeptide
PKSSDKTHTCPPCPAPEAEGAPSVFLFPPKPKDTLMISRTPEVTCVVVDVSHEDPEVKFNWYVDGVEVHNAKTKPREEQYNSTYRVVSVLTVLHQDWLNGKEYKCKVSNKALPSSIEKTISKAKGQPREPRVYTLPPCRDELTKNQVSLTCLVKGFYPSDIAVEWESNGQPENNYKTTPPVLVSDGSFTLYSKLTVDKSRWQQGNVFSCSVMHEALHNHYTQKSLSLSPG

SEQ ID NO: 259 - protein, 536 aa, Artificial Sequence
  Description of Artificial Sequence: Synthetic polypeptide
IWELKKDVYVVELDWYPDAPGEMVVLTCDTPEEDGITWTLDQSSEVLGSGKTLTIQVKEFGDAGQYTCHKGGEVLSHSLLLLHKKEDGIWSTDILKDQKEPKNKTFLRCEAKNYSGRFTCWWLTTISTDLTFSVKSSRGSSDPQGVTCGAATLSAERVRGDNKEYEYSVECQEDSACPAAEESLPIEVMVDAVHKLKYENYTSSFFIRDIIKPDPPKNLQLKPLKNSRQVEVSWEYPDTWSTPHSYFSLTFCVQVQGKSKREKKDRVFTDKTSATVICRKNASISVRAQDRYYSSSWSEWASVPCSPKSSDKTHTCPPCPAPELLGGPSVFLFPPKPKDTLMISRTPEVTCVVVDVSHEDPEVKFNWYVDGVEVHNAKTKPREEQYNSTYRVVSVLTVLHQDWLNGKEYKCKVSNKALPAPIEKTISKAKGQPREPQVCTLPPSRDELTENQVSLTCLVKGFYPSDIAVEWESNGQPENNYKTTPPVLDSDGSFFLYSWLTVDKSRWQQGNVFSCSVMHEALHNHYTQKSLSLSPG

SEQ ID NO: 260 - protein, 536 aa, Artificial Sequence
  Description of Artificial Sequence: Synthetic polypeptide
IWELKKDVYVVELDWYPDAPGEMVVLTCDTPEEDGITWTLDQSSEVLGSGKTLTIQVKEFGDAGQYTCHKGGEVLSHSLLLLHKKEDGIWSTDILKDQKEPKNKTFLRCEAKNYSGRFTCWWLTTISTDLTFSVKSSRGSSDPQGVTCGAATLSAERVRGDNKEYEYSVECQEDSACPAAEESLPIEVMVDAVHKLKYENYTSSFFIRDIIKPDPPKNLQLKPLKNSRQVEVSWEYPDTWSTPHSYFSLTFCVQVQGKSKREKKDRVFTDKTSATVICRKNASISVRAQDRYYSSSWSEWASVPCSPKSSDKTHTCPPCPAPEAAGGPSVFLFPPKPKDTLMISRTPEVTCVVVDVSHEDPEVKFNWYVDGVEVHNAKTKPREEQYNSTYRVVSVLTVLHQDWLNGKEYKCKVSNKALPAPIEKTISKAKGQPREPQVCTLPPSRDELTENQVSLTCLVKGFYPSDIAVEWESNGQPENNYKTTPPVLDSDGSFFLYSWLTVDKSRWQQGNVFSCSVMHEALHNHYTQKSLSLSPG

SEQ ID NO: 261 - protein, 536 aa, Artificial Sequence
  Description of Artificial Sequence: Synthetic polypeptide
IWELKKDVYVVELDWYPDAPGEMVVLTCDTPEEDGITWTLDQSSEVLGSGKTLTIQVKEFGDAGQYTCHKGGEVLSHSLLLLHKKEDGIWSTDILKDQKEPKNKTFLRCEAKNYSGRFTCWWLTTISTDLTFSVKSSRGSSDPQGVTCGAATLSAERVRGDNKEYEYSVECQEDSACPAAEESLPIEVMVDAVHKLKYENYTSSFFIRDIIKPDPPKNLQLKPLKNSRQVEVSWEYPDTWSTPHSYFSLTFCVQVQGKSKREKKDRVFTDKTSATVICRKNASISVRAQDRYYSSSWSEWASVPCSPKSSDKTHTCPPCPAPEAAGGPSVFLFPPKPKDTLMISRTPEVTCVVVDVSHEDPEVKFNWYVDGVEVHNAKTKPREEQYNSTYRVVSVLTVLHQDWLNGKEYKCKVSNKALAAPIEKTISKAKGQPREPQVCTLPPSRDELTENQVSLTCLVKGFYPSDIAVEWESNGQPENNYKTTPPVLDSDGSFFLYSWLTVDKSRWQQGNVFSCSVMHEALHNHYTQKSLSLSPG

SEQ ID NO: 262 - protein, 536 aa, Artificial Sequence
  Description of Artificial Sequence: Synthetic polypeptide
IWELKKDVYVVELDWYPDAPGEMVVLTCDTPEEDGITWTLDQSSEVLGSGKTLTIQVKEFGDAGQYTCHKGGEVLSHSLLLLHKKEDGIWSTDILKDQKEPKNKTFLRCEAKNYSGRFTCWWLTTISTDLTFSVKSSRGSSDPQGVTCGAATLSAERVRGDNKEYEYSVECQEDSACPAAEESLPIEVMVDAVHKLKYENYTSSFFIRDIIKPDPPKNLQLKPLKNSRQVEVSWEYPDTWSTPHSYFSLTFCVQVQGKSKREKKDRVFTDKTSATVICRKNASISVRAQDRYYSSSWSEWASVPCSPKSSDKTHTCPPCPAPEAEGAPSVFLFPPKPKDTLMISRTPEVTCVVVDVSHEDPEVKFNWYVDGVEVHNAKTKPREEQYNSTYRVVSVLTVLHQDWLNGKEYKCKVSNKALPSSIEKTISKAKGQPREPQVCTLPPSRDELTENQVSLTCLVKGFYPSDIAVEWESNGQPENNYKTTPPVLDSDGSFFLYSWLTVDKSRWQQGNVFSCSVMHEALHNHYTQKSLSLSPG

SEQ ID NO: 263 - protein, 536 aa, Artificial Sequence; identical to SEQ ID NO: 259
  Description of Artificial Sequence: Synthetic polypeptide

SEQ ID NO: 264 - protein, 536 aa, Artificial Sequence; identical to SEQ ID NO: 259
  Description of Artificial Sequence: Synthetic polypeptide

SEQ ID NO: 265 - protein, 536 aa, Artificial Sequence; identical to SEQ ID NO: 259
  Description of Artificial Sequence: Synthetic polypeptide

SEQ ID NO: 266 - protein, 442 aa, Artificial Sequence
  Description of Artificial Sequence: Synthetic polypeptide
RNLPVATPDPGMFPCLHHSQNLLRAVSNMLQKARQTLEFYPCTSEEIDHEDITKDKTSTVEACLPLELTKNESCLNSRETSFITNGSCLASRKTSFMMALCLSSIYEDLKMYQVEFKTMNAKLLMDPKRQIFLDQNMLAVIDELMQALNFNSETVPQKSSLEEPDFYKTKIKLCILLHAFRIRAVTIDRVMSYLNASGGGGSGGGGSGGGGSPKSSDKTHTCPPCPAPELLGGPSVFLFPPKPKDTLMISRTPEVTCVVVDVSHEDPEVKFNWYVDGVEVHNAKTKPREEQYNSTYRVVSVLTVLHQDWLNGKEYKCKVSNKALPAPIEKTISKAKGQPREPQVCTLPPSRDELTENQVSLTCLVKGFYPSDIAVEWESNGQPENNYKTTPPVLDSDGSFFLYSWLTVDKSRWQQGNVFSCSVMHEALHNHYTQKSLSLSPG

SEQ ID NO: 267 - protein, 541 aa, Artificial Sequence
  Description of Artificial Sequence: Synthetic polypeptide
IWELKKDVYVVELDWYPDAPGEMVVLTCDTPEEDGITWTLDQSSEVLGSGKTLTIQVKEFGDAGQYTCHKGGEVLSHSLLLLHKKEDGIWSTDILKDQKEPKNKTFLRCEAKNYSGRFTCWWLTTISTDLTFSVKSSRGSSDPQGVTCGAATLSAERVRGDNKEYEYSVECQEDSACPAAEESLPIEVMVDAVHKLKYENYTSSFFIRDIIKPDPPKNLQLKPLKNSRQVEVSWEYPDTWSTPHSYFSLTFCVQVQGKSKREKKDRVFTDKTSATVICRKNASISVRAQDRYYSSSWSEWASVPCSGGGGSPKSSDKTHTCPPCPAPELLGGPSVFLFPPKPKDTLMISRTPEVTCVVVDVSHEDPEVKFNWYVDGVEVHNAKTKPREEQYNSTYRVVSVLTVLHQDWLNGKEYKCKVSNKALPAPIEKTISKAKGQPREPQVCTLPPSRDELTENQVSLTCLVKGFYPSDIAVEWESNGQPENNYKTTPPVLDSDGSFFLYSWLTVDKSRWQQGNVFSCSVMHEALHNHYTQKSLSLSPG

SEQ ID NO: 268 - protein, 541 aa, Artificial Sequence
  Description of Artificial Sequence: Synthetic polypeptide
IWELKKDVYVVELDWYPDAPGEMVVLTCDTPEEDGITWTLDQSSEVLGSGKTLTIQVKEFGDAGQYTCHKGGEVLSHSLLLLHKKEDGIWSTDILKDQKEPKNKTFLRCEAKNYSGRFTCWWLTTISTDLTFSVKSSRGSSDPQGVTCGAATLSAERVRGDNKEYEYSVECQEDSASPAAEESLPIEVMVDAVHKLKYENYTSSFFIRDIIKPDPPKNLQLKPLKNSRQVEVSWEYPDTWSTPHSYFSLTFCVQVQGKSKREKKDRVFTDKTSATVICRKNASISVRAQDRCYSSSWSEWASVPCSGGGGSPKSSDKTHTCPPCPAPELLGGPSVFLFPPKPKDTLMISRTPEVTCVVVDVSHEDPEVKFNWYVDGVEVHNAKTKPREEQYNSTYRVVSVLTVLHQDWLNGKEYKCKVSNKALPAPIEKTISKAKGQPREPQVCTLPPSRDELTENQVSLTCLVKGFYPSDIAVEWESNGQPENNYKTTPPVLDSDGSFFLYSWLTVDKSRWQQGNVFSCSVMHEALHNHYTQKSLSLSPG

SEQ ID NO: 269 - protein, 536 aa, Artificial Sequence
  Description of Artificial Sequence: Synthetic polypeptide
IWELKKDVYVVELDWYPDAPGEMVVLTCDTPEEDGITWTLDQSSEVLGSGKTLTIQVKEFGDAGQYTCHKGGEVLSHSLLLLHKKEDGIWSTDILKDQKEPKNKTFLRCEAKNYSGRFTCWWLTTISTDLTFSVKSSRGSSDPQGVTCGAATLSAERVRGDNKEYEYSVECQEDSASPAAEESLPIEVMVDAVHKLKYENYTSSFFIRDIIKPDPPKNLQLKPLKNSRQVEVSWEYPDTWSTPHSYFSLTFCVQVQGKSKREKKDRVFTDKTSATVICRKNASISVRAQDRCYSSSWSEWASVPCSPKSSDKTHTCPPCPAPELLGGPSVFLFPPKPKDTLMISRTPEVTCVVVDVSHEDPEVKFNWYVDGVEVHNAKTKPREEQYNSTYRVVSVLTVLHQDWLNGKEYKCKVSNKALPAPIEKTISKAKGQPREPQVCTLPPSRDELTENQVSLTCLVKGFYPSDIAVEWESNGQPENNYKTTPPVLDSDGSFFLYSWLTVDKSRWQQGNVFSCSVMHEALHNHYTQKSLSLSPG

SEQ ID NO: 270 - protein, 536 aa, Artificial Sequence
  Description of Artificial Sequence: Synthetic polypeptide
IWELKKDVYVVELDWYPDAPGEMVVLTCDTPEEDGITWTLDQSSEVLGSGKTLTIQVKEFGDAGQYTCHKGGEVLSHSLLLLHKKEDGIWSTDILKDQKEPKNKTFLRCEAKNYSGRFTCWWLTTISTDLTFSVKSSRGSSDPQGVTCGAATLSAERVRGDNKEYEYSVECQEDSASPAAEESLPIEVMVDAVHKLKYENYTSSFFIRDIIKPDPPKNLQLKPLKNSRQVEVSWEYPDTWSTPHSYFSLTFCVQVQGKSKREKKDRVFTDKTSATVICRKNASISVRAQDRCYSSSWSEWASVPCSPKSSDKTHTCPPCPAPEAAGGPSVFLFPPKPKDTLMISRTPEVTCVVVDVSHEDPEVKFNWYVDGVEVHNAKTKPREEQYNSTYRVVSVLTVLHQDWLNGKEYKCKVSNKALPAPIEKTISKAKGQPREPQVCTLPPSRDELTENQVSLTCLVKGFYPSDIAVEWESNGQPENNYKTTPPVLDSDGSFFLYSWLTVDKSRWQQGNVFSCSVMHEALHNHYTQKSLSLSPG

SEQ ID NO: 271 - protein, 536 aa, Artificial Sequence
  Description of Artificial Sequence: Synthetic polypeptide
IWELKKDVYVVELDWYPDAPGEMVVLTCDTPEEDGITWTLDQSSEVLGSGKTLTIQVKEFGDAGQYTCHKGGEVLSHSLLLLHKKEDGIWSTDILKDQKEPKNKTFLRCEAKNYSGRFTCWWLTTISTDLTFSVKSSRGSSDPQGVTCGAATLSAERVRGDNKEYEYSVECQEDSASPAAEESLPIEVMVDAVHKLKYENYTSSFFIRDIIKPDPPKNLQLKPLKNSRQVEVSWEYPDTWSTPHSYFSLTFCVQVQGKSKREKKDRVFTDKTSATVICRKNASISVRAQDRCYSSSWSEWASVPCSPKSSDKTHTCPPCPAPEAAGGPSVFLFPPKPKDTLMISRTPEVTCVVVDVSHEDPEVKFNWYVDGVEVHNAKTKPREEQYNSTYRVVSVLTVLHQDWLNGKEYKCKVSNKALAAPIEKTISKAKGQPREPQVCTLPPSRDELTENQVSLTCLVKGFYPSDIAVEWESNGQPENNYKTTPPVLDSDGSFFLYSWLTVDKSRWQQGNVFSCSVMHEALHNHYTQKSLSLSPG

SEQ ID NO: 272 - protein, 536 aa, Artificial Sequence
  Description of Artificial Sequence: Synthetic polypeptide
IWELKKDVYVVELDWYPDAPGEMVVLTCDTPEEDGITWTLDQSSEVLGSGKTLTIQVKEFGDAGQYTCHKGGEVLSHSLLLLHKKEDGIWSTDILKDQKEPKNKTFLRCEAKNYSGRFTCWWLTTISTDLTFSVKSSRGSSDPQGVTCGAATLSAERVRGDNKEYEYSVECQEDSASPAAEESLPIEVMVDAVHKLKYENYTSSFFIRDIIKPDPPKNLQLKPLKNSRQVEVSWEYPDTWSTPHSYFSLTFCVQVQGKSKREKKDRVFTDKTSATVICRKNASISVRAQDRCYSSSWSEWASVPCSPKSSDKTHTCPPCPAPEAEGAPSVFLFPPKPKDTLMISRTPEVTCVVVDVSHEDPEVKFNWYVDGVEVHNAKTKPREEQYNSTYRVVSVLTVLHQDWLNGKEYKCKVSNKALPSSIEKTISKAKGQPREPQVCTLPPSRDELTENQVSLTCLVKGFYPSDIAVEWESNGQPENNYKTTPPVLDSDGSFFLYSWLTVDKSRWQQGNVFSCSVMHEALHNHYTQKSLSLSPG

SEQ ID NO: 273 - protein, 536 aa, Artificial Sequence
  Description of Artificial Sequence: Synthetic polypeptide
IWELKKDVYVVELDWYPDAPGEMVVLTCDTPEEDGITWTLDQSSEVLGSGKTLTIQVKEFGDAGQYTCHKGGEVLSHSLLLLHKKEDGIWSTDILKDQKEPKNKTFLRCEAKNYSGRFTCWWLTTISTDLTFSVKSSRGSSDPQGVTCGAATLSAERVRGDNKEYEYSVECQEDSACPAAEESLPIEVMVDAVHKLKYENYTSSFFIRDIIKPDPPKNLQLKPLKNSRQVEVSWEYPDTWSTPHSYFSLTFCVQVQGKSKREKKDRVFTDKTSATVICRKNASISVRAQDRCYSSSWSEWASVPCSPKSSDKTHTCPPCPAPELLGGPSVFLFPPKPKDTLMISRTPEVTCVVVDVSHEDPEVKFNWYVDGVEVHNAKTKPREEQYNSTYRVVSVLTVLHQDWLNGKEYKCKVSNKALPAPIEKTISKAKGQPREPQVCTLPPSRDELTENQVSLTCLVKGFYPSDIAVEWESNGQPENNYKTTPPVLDSDGSFFLYSWLTVDKSRWQQGNVFSCSVMHEALHNHYTQKSLSLSPG

SEQ ID NO: 274 - protein, 536 aa, Artificial Sequence
  Description of Artificial Sequence: Synthetic polypeptide
IWELKKDVYVVELDWYPDAPGEMVVLTCDTPEEDGITWTLDQSSEVLGSGKTLTIQVKEFGDAGQYTCHKGGEVLSHSLLLLHKKEDGIWSTDILKDQKEPKNKTFLRCEAKNYSGRFTCWWLTTISTDLTFSVKSSRGSSDPQGVTCGAATLSAERVRGDNKEYEYSVECQEDSACPAAEESLPIEVMVDAVHKLKYENYTSSFFIRDIIKPDPPKNLQLKPLKNSRQVEVSWEYPDTWSTPHSYFSLTFCVQVQGKSKREKKDRVFTDKTSATVICRKNASISVRAQDRCYSSSWSEWASVPCSPKSSDKTHTCPPCPAPEAAGGPSVFLFPPKPKDTLMISRTPEVTCVVVDVSHEDPEVKFNWYVDGVEVHNAKTKPREEQYNSTYRVVSVLTVLHQDWLNGKEYKCKVSNKALPAPIEKTISKAKGQPREPQVCTLPPSRDELTENQVSLTCLVKGFYPSDIAVEWESNGQPENNYKTTPPVLDSDGSFFLYSWLTVDKSRWQQGNVFSCSVMHEALHNHYTQKSLSLSPG

SEQ ID NO: 275 - protein, 536 aa, Artificial Sequence
  Description of Artificial Sequence: Synthetic polypeptide
IWELKKDVYVVELDWYPDAPGEMVVLTCDTPEEDGITWTLDQSSEVLGSGKTLTIQVKEFGDAGQYTCHKGGEVLSHSLLLLHKKEDGIWSTDILKDQKEPKNKTFLRCEAKNYSGRFTCWWLTTISTDLTFSVKSSRGSSDPQGVTCGAATLSAERVRGDNKEYEYSVECQEDSACPAAEESLPIEVMVDAVHKLKYENYTSSFFIRDIIKPDPPKNLQLKPLKNSRQVEVSWEYPDTWSTPHSYFSLTFCVQVQGKSKREKKDRVFTDKTSATVICRKNASISVRAQDRCYSSSWSEWASVPCSPKSSDKTHTCPPCPAPEAAGGPSVFLFPPKPKDTLMISRTPEVTCVVVDVSHEDPEVKFNWYVDGVEVHNAKTKPREEQYNSTYRVVSVLTVLHQDWLNGKEYKCKVSNKALAAPIEKTISKAKGQPREPQVCTLPPSRDELTENQVSLTCLVKGFYPSDIAVEWESNGQPENNYKTTPPVLDSDGSFFLYSWLTVDKSRWQQGNVFSCSVMHEALHNHYTQKSLSLSPG

SEQ ID NO: 276 - protein, 536 aa, Artificial Sequence
  Description of Artificial Sequence: Synthetic polypeptide
IWELKKDVYVVELDWYPDAPGEMVVLTCDTPEEDGITWTLDQSSEVLGSGKTLTIQVKEFGDAGQYTCHKGGEVLSHSLLLLHKKEDGIWSTDILKDQKEPKNKTFLRCEAKNYSGRFTCWWLTTISTDLTFSVKSSRGSSDPQGVTCGAATLSAERVRGDNKEYEYSVECQEDSACPAAEESLPIEVMVDAVHKLKYENYTSSFFIRDIIKPDPPKNLQLKPLKNSRQVEVSWEYPDTWSTPHSYFSLTFCVQVQGKSKREKKDRVFTDKTSATVICRKNASISVRAQDRCYSSSWSEWASVPCSPKSSDKTHTCPPCPAPEAEGAPSVFLFPPKPKDTLMISRTPEVTCVVVDVSHEDPEVKFNWYVDGVEVHNAKTKPREEQYNSTYRVVSVLTVLHQDWLNGKEYKCKVSNKALPSSIEKTISKAKGQPREPQVCTLPPSRDELTENQVSLTCLVKGFYPSDIAVEWESNGQPENNYKTTPPVLDSDGSFFLYSWLTVDKSRWQQGNVFSCSVMHEALHNHYTQKSLSLSPG

SEQ ID NO: 277 - protein, 536 aa, Artificial Sequence; identical to SEQ ID NO: 274
  Description of Artificial Sequence: Synthetic polypeptide

SEQ ID NO: 278 - protein, 536 aa, Artificial Sequence; identical to SEQ ID NO: 275
  Description of Artificial Sequence: Synthetic polypeptide

SEQ ID NO: 279 - protein, 536 aa, Artificial Sequence; identical to SEQ ID NO: 276
  Description of Artificial Sequence: Synthetic polypeptide

SEQ ID NO: 280 - protein, 19 aa, Artificial Sequence
  Description of Artificial Sequence: Synthetic peptide
  MOD_RES (17)..(17): Leu or Glu
ESKYGPPCPPCPAPEFXGG

SEQ ID NO: 281 - protein, 18 aa, Artificial Sequence
  Description of Artificial Sequence: Synthetic peptide
  MOD_RES (16)..(16): Leu or Glu
SKYGPPCPPCPAPEFXGG

SEQ ID NO: 282 - protein, 19 aa, Artificial Sequence
  Description of Artificial Sequence: Synthetic peptide
ESKYGPPCPPCPAPEFLGG

SEQ ID NO: 283 - protein, 18 aa, Artificial Sequence
  Description of Artificial Sequence: Synthetic peptide
SKYGPPCPPCPAPEFLGG

SEQ ID NO: 284 - protein, 19 aa, Artificial Sequence
  Description of Artificial Sequence: Synthetic peptide
ESKYGPPCPPCPAPEFEGG

SEQ ID NO: 285 - protein, 18 aa, Artificial Sequence
  Description of Artificial Sequence: Synthetic peptide
SKYGPPCPPCPAPEFEGG

SEQ ID NO: 286 - protein, 544 aa, Artificial Sequence
  Description of Artificial Sequence: Synthetic polypeptide
MWELEKDVYVVEVDWTPDAPGETVNLTCDTPEEDDITWTSDQRHGVIGSGKTLTITVKEFLDAGQYTCHKGGETLSHSHLLLHKKENGIWSTEILKNFKNKTFLKCEAPNYSGRFTCSWLVQRNMDLKFNIKSSSSSPDSRAVTCGMASLSAEKVTLDQRDYEKYSVSCQEDVTCPTAEETLPIELALEARQQNKYENYSTSFFIRDIIKPDPPKNLQMKPLKNSQVEVSWEYPDSWSTPHSYFSLKFFVRIQRKKEKMKETEEGCNQKGAFLVEKTSTEVQCKGGNVCVQAQDRYYNSSCSKWACVPCRVRSPRGPTIKPCPPCKCPAPNLLGGPSVFIFPPKIKDVLMISLSPIVTCVVVDVSEDDPDVQISWFVNNVEVHTAQTQTHREDYNSTLRVVSALPIQHQDWMSGKEFKCKVNNKDLPAPIERTISKPKGSVRAPQVYVLPPPEEEMTEKQVTLTCMVTDFMPEDIYVEWTNNGKTELNYKNTEPVLDSDGSYFMYSWLRVEKKNWVERNSYSCSVVHEGLHNHHTTKSFSRTPG

SEQ ID NO: 287 - protein, 439 aa, Artificial Sequence
  Description of Artificial Sequence: Synthetic polypeptide
RVIPVSGPARCLSQSRNLLKTTDDMVKTAREKLKHYSCTAEDIDHEDITRDQTSTLKTCLPLELHKNESCLATRETSSTTRGSCLPPQKTSLMMTLCLGSIYEDLKMYQTEFQAINAALQNHNHQQIILDKGMLVAIDELMQSLNHNGETLRQKPPVGEADPYRVKMKLCILLHAFSTRVVTINRVMGYLSSAGGGGSGGGGSGGGGSPRGPTIKPCPPCKCPAPNLLGGPSVFIFPPKIKDVLMISLSPIVTCVVVDVSEDDPDVQISWFVNNVEVHTAQTQTHREDYNSTLRVVSALPIQHQDWMSGKEFKCKVNNKDLPAPIERTISKPKGSVRAPRVYVLPPPEEEMTKKQVTLTCMVTDFMPEDIYVEWTNNGKTELNYKNTEPVLVSDGSYTMYSKLRVEKKNWVERNSYSCSVVHEGLHNHHTTKSFSRTPG

SEQ ID NO: 288 - protein, 544 aa, Artificial Sequence
  Description of Artificial Sequence: Synthetic polypeptide
MWELEKDVYVVEVDWTPDAPGETVNLTCDTPEEDDITWTSDQRHGVIGSGKTLTITVKEFLDAGQYTCHKGGETLSHSHLLLHKKENGIWSTEILKNFKNKTFLKCEAPNYSGRFTCSWLVQRNMDLKFNIKSSSSSPDSRAVTCGMASLSAEKVTLDQRDYEKYSVSCQEDVTCPTAEETLPIELALEARQQNKYENYSTSFFIRDIIKPDPPKNLQMKPLKNSQVEVSWEYPDSWSTPHSYFSLKFFVRIQRKKEKMKETEEGCNQKGAFLVEKTSTEVQCKGGNVCVQAQDRYYNSSCSKWACVPCRVRSPRGPTIKPCPPCKCPAPNAAGGPSVFIFPPKIKDVLMISLSPIVTCVVVDVSEDDPDVQISWFVNNVEVHTAQTQTHREDYNSTLRVVSALPIQHQDWMSGKEFKCKVNNKDLGAPIERTISKPKGSVRAPQVYVLPPPEEEMTEKQVTLTCMVTDFMPEDIYVEWTNNGKTELNYKNTEPVLDSDGSYFMYSWLRVEKKNWVERNSYSCSVVHEGLHNHHTTKSFSRTPG

SEQ ID NO: 289 - protein, 439 aa, Artificial Sequence
  Description of Artificial Sequence: Synthetic polypeptide
RVIPVSGPARCLSQSRNLLKTTDDMVKTAREKLKHYSCTAEDIDHEDITRDQTSTLKTCLPLELHKNESCLATRETSSTTRGSCLPPQKTSLMMTLCLGSIYEDLKMYQTEFQAINAALQNHNHQQIILDKGMLVAIDELMQSLNHNGETLRQKPPVGEADPYRVKMKLCILLHAFSTRVVTINRVMGYLSSAGGGGSGGGGSGGGGSPRGPTIKPCPPCKCPAPNAAGGPSVFIFPPKIKDVLMISLSPIVTCVVVDVSEDDPDVQISWFVNNVEVHTAQTQTHREDYNSTLRVVSALPIQHQDWMSGKEFKCKVNNKDLGAPIERTISKPKGSVRAPRVYVLPPPEEEMTKKQVTLTCMVTDFMPEDIYVEWTNNGKTELNYKNTEPVLVSDGSYTMYSKLRVEKKNWVERNSYSCSVVHEGLHNHHTTKSFSRTPG

SEQ ID NO: 290 - protein, 536 aa, Artificial Sequence; identical to SEQ ID NO: 261
  Description of Artificial Sequence: Synthetic polypeptide

SEQ ID NO: 291 - protein, 443 aa, Artificial Sequence; identical to SEQ ID NO: 142
  Description of Artificial Sequence: Synthetic polypeptide

SEQ ID NO: 292 - protein, 558 aa, Artificial Sequence
  Description of Artificial Sequence: Synthetic polypeptide
MDMRVPAQLLGLLLLWLPGARCIWELKKDVYVVELDWYPDAPGEMVVLTCDTPEEDGITWTLDQSSEVLGSGKTLTIQVKEFGDAGQYTCHKGGEVLSHSLLLLHKKEDGIWSTDILKDQKEPKNKTFLRCEAKNYSGRFTCWWLTTISTDLTFSVKSSRGSSDPQGVTCGAATLSAERVRGDNKEYEYSVECQEDSACPAAEESLPIEVMVDAVHKLKYENYTSSFFIRDIIKPDPPKNLQLKPLKNSRQVEVSWEYPDTWSTPHSYFSLTFCVQVQGKSKREKKDRVFTDKTSATVICRKNASISVRAQDRYYSSSWSEWASVPCSPKSSDKTHTCPPCPAPEAAGGPSVFLFPPKPKDTLMISRTPEVTCVVVDVSHEDPEVKFNWYVDGVEVHNAKTKPREEQYNSTYRVVSVLTVLHQDWLNGKEYKCKVSNKALAAPIEKTISKAKGQPREPQVCTLPPSRDELTENQVSLTCLVKGFYPSDIAVEWESNGQPENNYKTTPPVLDSDGSFFLYSWLTVDKSRWQQGNVFSCSVMHEALHNHYTQKSLSLSPG

SEQ ID NO: 293 - protein, 465 aa, Artificial Sequence
  Description of Artificial Sequence: Synthetic polypeptide
MDMRVPAQLLGLLLLWLPGARCRNLPVATPDPGMFPCLHHSQNLLRAVSNMLQKARQTLEFYPCTSEEIDHEDITKDKTSTVEACLPLELTKNESCLNSRETSFITNGSCLASRKTSFMMALCLSSIYEDLKMYQVEFKTMNAKLLMDPKRQIFLDQNMLAVIDELMQALNFNSETVPQKSSLEEPDFYKTKIKLCILLHAFRIRAVTIDRVMSYLNASGGGGSGGGGSGGGGSEPKSSDKTHTCPPCPAPEAAGGPSVFLFPPKPKDTLMISRTPEVTCVVVDVSHEDPEVKFNWYVDGVEVHNAKTKPREEQYNSTYRVVSVLTVLHQDWLNGKEYKCKVSNKALAAPIEKTISKAKGQPREPRVYTLPPCRDELTKNQVSLTCLVKGFYPSDIAVEWESNGQPENNYKTTPPVLVSDGSFTLYSKLTVDKSRWQQGNVFSCSVMHEALHNHYTQKSLSLSPG

SEQ ID NO: 294 - protein, 40 aa, Artificial Sequence
  Description of Artificial Sequence: Synthetic polypeptide
  MISC_FEATURE (1)..(40): This sequence may encompass 1-20 "Gly Ser" repeating units
GSGSGSGSGSGSGSGSGSGSGSGSGSGSGSGSGSGSGSGS

SEQ ID NO: 295 - protein, 60 aa, Artificial Sequence
  Description of Artificial Sequence: Synthetic polypeptide
  MISC_FEATURE (1)..(60): This sequence may encompass 1-20 "Gly Gly Ser" repeating units
GGSGGSGGSGGSGGSGGSGGSGGSGGSGGSGGSGGSGGSGGSGGSGGSGGSGGSGGSGGS

SEQ ID NO: 296 - protein, 80 aa, Artificial Sequence
  Description of Artificial Sequence: Synthetic polypeptide
  MISC_FEATURE (1)..(80): This sequence may encompass 1-20 "Gly Gly Gly Ser" repeating units
GGGSGGGSGGGSGGGSGGGSGGGSGGGSGGGSGGGSGGGSGGGSGGGSGGGSGGGSGGGSGGGSGGGSGGGSGGGSGGGS

SEQ ID NO: 297 - protein, 80 aa, Artificial Sequence
  Description of Artificial Sequence: Synthetic polypeptide
  MISC_FEATURE (1)..(80): This sequence may encompass 1-20 "Gly Gly Ser Gly" repeating units
GGSGGGSGGGSGGGSGGGSGGGSGGGSGGGSGGGSGGGSGGGSGGGSGGGSGGGSGGGSGGGSGGGSGGGSGGGSGGGSG

SEQ ID NO: 298 - protein, 100 aa, Artificial Sequence; identical to SEQ ID NO: 120
  Description of Artificial Sequence: Synthetic polypeptide
  MISC_FEATURE (1)..(100): This sequence may encompass 1-20 "Gly Gly Ser Gly Gly" repeating units

SEQ ID NO: 299 - protein, 100 aa, Artificial Sequence; identical to SEQ ID NO: 119
  Description of Artificial Sequence: Synthetic polypeptide
  MISC_FEATURE (1)..(100): This sequence may encompass 1-20 "Gly Gly Gly Gly Ser" repeating units
